(19) United States
(12) Patent Application Publication
(10) Pub. No.: US 2009/0221670 A1
(43) Pub. Date: Sep. 3, 2009

(54) Method for diagnosis and treatment of a mental disease

(75) Inventors: Anders Borglum, Arhus (DK); Jacob Severinsen, Arhus (DK); Henrik Ewald, Hobro (DK); Ole Mors, Risskov (DK); Walter Muir, Peebles (GB); Douglas Blackwood, Edinburgh (GB)

Correspondence Address: BROWDY AND NEIMARK, P.L.L.C.;624 NINTH STREET, NW, SUITE 300, WASHINGTON, DC, 20001-5303, US

(73) Assignees: Aarhus Universitet, Arhus C (DK); Region Midtjyliand, Viborg (DK)

(21) Appl. No.: 11/914,342

(22) PCT Filed: May 11, 2006
(86) PCT No.: PCT/DK06/00254

§ 371 Date: Jul. 23, 2008

(30) Foreign Application Priority Data
May 11, 2005 (DK) PA 2005 00680

(51) Int. Cl. A61K 48/00; C12Q 1/68; C12Q 1/02; C07H 21/04; C07K 14/00; C07K 16/18; G01N 33/53; C12N 15/00

(52) U.S. Cl. 514/44 A; 435/6; 435/29; 536/24.31; 530/350; 530/387.9; 435/7.1; 435/320.1; 514/44 R; 536/24.5

(57) ABSTRACT

The present invention relates to association of one or more polymorphisms located in the human NHP2L1, PACSIN2, SERHL, PIPPIN, BRD1, EP300, FAM19A5 and/or GPR24 genes to the occurrence of schizophrenia and/or bipolar disorder. The invention relates both to methods for diagnosing a predisposition to said diseases and for treating subjects having said diseases.

### FIELD OF INVENTION

[0001] The present invention relates to association of one or more polymorphisms located in the human NHP2L1, PACSIN2, SERHL, PIPPIN, BRD1, EP300, FAM19A5 and/or GPR24 genes to the occurrence of schizophrenia and/or bipolar disorder. The invention relates both to methods for diagnosing a predisposition to said diseases and for treating subjects having said diseases.

### BACKGROUND OF INVENTION

### Polymorphisms

[0002] DNA polymorphisms provide an efficient way to study the association of genes and diseases by analysis of linkage and linkage disequilibrium. With the sequencing of the human genome a myriad of hitherto unknown genetic polymorphisms have been detected. Most common among these are the single nucleotide polymorphisms, also called SNPs, of which are counted now to several millions. Other examples of genetic polymorphisms are variable number of tandem repeat polymorphisms, insertions, deletions and block modifications. Tandem repeats often have multiple different alleles (variants), whereas the other groups of polymorphisms usually just have two alleles. Some of these genetic polymorphisms probably play a direct role in the biology of the individuals, including the risk of developing disease, but the virtue of the majority is that they can serve as markers for the surrounding DNA.

[0003] The association of an allele of one sequence polymorphism with particular alleles of other sequence polymorphisms in the surrounding DNA has two origins, known in the genetic field as linkage and linkage disequilibrium, respectively. Linkage arises because large parts of chromosomes are passed unchanged from parents to offspring, so that minor regions of a chromosome tend to flow unchanged from one generation to the next and also to be similar in different branches of the same family. Linkage is gradually eroded by recombination occurring in the cells of the germline, but typically operates over multiple generations and distances of a number of million bases in the DNA.

[0004] Linkage disequilibrium deals with whole populations and has its origin in the (distant) forefather in whose DNA a new sequence polymorphism arose. The immediate surroundings in the DNA of the forefather will tend to stay with the new allele for many generations. Recombination and changes in the composition of the population will again erode the association, but the new allele and the alleles of any other polymorphism nearby will often be partly associated among unrelated humans even today. A crude estimate suggests that alleles of sequence polymorphisms with distances less then 10000 bases in the DNA will have tended to stay together since modern man arose. Linkage disequilibrium in limited populations, for instance Europeans, often extends over longer distances, e.g. over more than 1,000,000 bases. This can be the result of newer mutations, but can also be a consequence of one or more “bottlenecks” with small population sizes and considerable inbreeding in the history of the current population. Two obvious possibilities for “bottlenecks” in Europeans are the exodus from Africa and the repopulation of Europe after the last ice age.

### Schizophrenia and Bipolar Disorder

[0005] The importance of genetics in the etiology of bipolar disorder (BPD) and schizophrenia (SCH) are by now an accepted fact and confirmed through family, twin and adoption studies (McGuffin et al., 1995; Potash and DePaulo, 2000). Overlapping between these diseases has long been noted clinically and a shared genetic heritability is probable according to genetic epidemiology studies and linkage studies (Berrettini, 2000; Potash et al., 2003a) Linkage studies have identified several shared susceptibility loci (on 18p11; 13q31; 10p14; and 22q11-13) which makes it plausible that there are partial shared genetic risks, and susceptibility genes. On chromosome 22q12-13 implication in schizophrenia has been suggested by weak linkage (Gill et al., 1996; Pulver et al., 1994) and a resent meta-analysis including 20 genome scans in schizophrenics has confirmed the locus 22q12-13 as a susceptibility locus. In addition significant linkage to BPD on 22q12-13 was evidenced by Kelso et al (Kelsoe et al., 2001). In a meta-analysis including 11 BPD and 18 schizophrenic genome scans 22q12-13 were one of two regions that showed strong evidence for harboring a susceptibility loci for both BPD and SCH (Badner and Gershon, 2002; Potash et al., 2003b). However, there were obtained no evidence that polymorphism of DNA in this locus is associated with the diseases.

### Genes

[0006] Several genes with known or unknown biological function have been mapped to chromosome 22q13.

### 1. BRD1

[0007] The gene was originally described in connection with study of the genes involved in oncogenic transformation in human acute leukemias and mapped to 22q13 by fluorescence in situ hybridization (McCullagh et al. (1999)).

[0008] In human acute leukemias the MLL gene is reciprocally translocated with one of a number of different partner genes. The precise mechanism of oncogenic transformation is unclear since most of the partner genes encode unrelated proteins. However, 2 partner genes, AF10 and AF17, are related through the presence of a cysteine-rich region and a leucine zipper. McCullagh et al. (1999) suggested that the identification of other proteins having these structures might aid understanding of their role in normal and leukemic cells. They reported the cloning of a novel human gene that encodes a 1,058-amino acid protein containing a cysteine-rich region related to that of AF10 and AF17. Overall, the protein was most closely related to the BR140 protein, and was therefore designated BRL (BR140-like gene). Northern blot analysis revealed that a 4.6-kb BRL transcript is expressed at high levels in testis and in several cell lines. A monoclonal antibody raised to a BRL peptide sequence confirmed its widespread expression as a 120-kD protein and demonstrated localization to the nucleus of spermatocytes.

[0009] The gene encodes a protein of unknown function. The protein contains a bromodomain, a sequence motif often found in transcriptional co-activators, and localizes to the nucleus in testis and several other cell types.

### 2. NHP2L1

[0010] In the course of sequencing cDNA clones from fetal brain cDNA libraries, Saito et al. (1996) isolated a gene that encodes a protein highly homologous to NHP2 from Saccharomyces cerevisiae (Kolodrubetz and Burgum, 1991). NHP2 is a high-mobility group (HMG)-like protein which is located in the nucleus, although it shows weak homology to some ribosomal proteins. The cDNA cloned by Saito et al. (1996), symbolized NHP2L1, was expressed in all human tissues examined and was localized to 12q24.3 by fluorescence in situ hybridization.

[0011] Originally named because of its sequence similarity to the Saccharomyces cerevisiae NHP2 (non-histone protein 2), this protein appears to be a highly conserved nuclear protein that is a component of the [U4/U6.U5] tri-snRNP. It binds to the 5′ stem-loop of U4 snRNA. It is suggested that the protein may play a role in the late stage of spliceosome assembly. The protein is related to the L7AE family of ribosomal proteins. The protein has ubiquitous tissue expression. Two transcript variants encoding the same protein have been found for human NHP2L1 gene.

### 3. PACSIN2

[0012] Human PACSIN2 gene was mapped to 22q13 (Sumoy et al. (2001)).

[0013] PACSIN family members, such as mouse Pacsin1 and chicken FAP52, are cytoplasmic adapter proteins with a common arrangement of domains and conserved regions, including a CDC15 N-terminal domain, which contains a RAEYL motif and a coiled-coil region, and a C-terminal SH3 domain. By searching an EST database for novel members of the PACSIN family, Ritter et al. (1999) identified ESTs encoding human PACSIN2 and mouse Pacsin2. The complete human PACSIN2 coding sequence, obtained from 2 overlapping retina ESTs, encodes a deduced 486-amino acid protein that shares 93.6% sequence identity with mouse Pacsin2. The PACSIN2 proteins contain a CDC15 N-terminal domain, a C-terminal SH3 domain, 3 conserved regions specific to the PACSIN family, and 3 asn-pro-phe (NPF) motifs, which potentially bind to EH domains. The PACSIN2 proteins share high sequence similarity with chicken FAP52 and mouse Pacsin1. However, compared to these proteins, PACSIN2 proteins have a 41-amino acid insertion, which contains 1 NPF motif. In contrast to the restricted neural expression of Pacsin1 protein (Plomann et al., 1998), Northern blot analysis detected Pacsin2 transcript expression in all tissues examined, with the highest levels in brain, heart, skeletal muscle, and ovary. Immunofluorescence microscopy revealed a broad, vesicle-like cytoplasmic distribution of recombinant Pacsin2 expressed in fibroblasts that appeared to partially overlap with the distributions of both the actin filament and microtubule networks. Ritter et al. (1999) suggested that PACSIN2 protein may participate in the organization of the actin cytoskeleton and the regulation of vesicular traffic.

[0014] Human PACSIN2 can homo- and hetero-aggregate with other PACSINs, bind dynamin 1, synaptojanin, synapsin 1 and the neural Wiskott-Aldrich syndrome protein (N-WASP), is phosphorylated by casein kinase 2 (CK2) and protein kinase C (PKC). Vesicle-like cytoplasmic distribution of the protein suggests its possible role in vesicle formation and transport.

### 4. SERHL

[0015] Sadusky et al. (2001) cloned Serhl by subtractive hybridization of transcripts upregulated in passively stretched mouse skeletal muscle. The deduced 311-amino acid protein contains a putative serine hydrolase active center, prenylation and N-myristoylation sites, several putative phosphorylation sites, an N-glycosylation site, and a C-terminal peroxisomal targeting sequence. Northern blot analysis detected transcripts of 1.4 and 2.4 kb expressed in all mouse tissues examined. Highest levels of both transcripts were detected in kidney, and lowest levels were detected in skeletal muscle and small intestine. Brain predominantly expressed the 2.4-kb form. Western blot analysis detected a Serhl protein with an apparent molecular mass of about 35 kD in mouse skeletal and cardiac muscle, brain, and kidney. Immunolocalization detected Serhl expressed in small perinuclear vesicles in mononucleated mouse myoblasts and recently fused multinucleated myotubes. By genomic sequence analysis Sadusky et al. (2001) mapped the SERHL gene to 22q 13.2.

### 5. PIPPIN

[0016] The gene encodes an RNA-binding protein, which is highly enriched in the brain, contains two putative double stranded RNA-binding domains, a cold-shock domain, binds with high specificity to the transcripts that encode H1 and H3.3. histone variants (Castiglia et al. 1996, Nastasi et al., 1999; Nastasi et al, 2000). It has been shown that PIPPIN inhibits translation of H1(0) and H3.3 mRNA in cell-free system. Based on this finding it has been suggested that PIPPIN down-regulates histone variant expression in the developing ret brain. The PIPPIN gene is mapped to 22q 13.2

### 6. EP300

[0017] Eckner et al. (1994) mapped the p300 gene, symbolized EP300, to 22q13.2.

[0018] EP300 encodes the adenovirus E1A-associated cellular p300 transcriptional co-activator protein. The growth-controlling functions of the adenovirus E1A oncoprotein depend on its ability to interact with a set of cellular proteins. Among these are the retinoblastoma protein, p107, p130, and p300. Eckner et al. (1994) isolated a cDNA encoding full-length human p300. p300 contains 3 cysteine- and histidine-rich regions of which the most carboxy-terminal region interacts specifically with E1A. In its center, p300 contains a bromodomain, a hallmark of certain transcriptional coactivators. p300 and CREB-binding protein (CREBBP, or CBP) are highly related in primary structure (Arany et al., 1994). Several protein motifs such as a bromodomain, a KIX domain, and 3 regions rich in cys/his residues are well conserved between these 2 proteins. Lin et al. (2001) identified a compactly folded 46-residue domain in CBP and p300, the IRF3-binding domain (IBID), and determined its structure by nuclear magnetic resonance spectroscopy. IBID has a helical framework containing an apparently flexible polyglutamine loop that participates in ligand binding. Spectroscopic data indicated that induced folding accompanies association of IBID with its partners, which exhibit no evident sequence similarities. IBID is an important contributor to signal integration by CBP and p300.

[0019] EP300 (p300) is a multifunctional protein:
[0020] like CPB it can stimulate transcription through activation of CREB. This EP300 activity is specifically inhibited by the adenovirus oncoprotein E1A;
[0021] EP300 has also been identified as a co-activator of HIF1A (hypoxia-inducible factor 1 alpha), and thus plays a role in the stimulation of hypoxia-induced genes such as VEGF;
[0022] EP300/CREBBP and IRF3 are components of DRAF1 (double-stranded RNA-activated factor-1), a positive regulator of interferon-stimulated gene transcription that functions as a direct response to viral infection (Weaver et al. 1998);
[0023] the formation of a complex between transcription factors STAT3 and SMAD1, bridged by p300, is involved in the cooperative signaling of cytokines LIF and BMP2 and the subsequent induction of astrocytes from neuronal progenitors (Nakashima et al. 1999);
[0024] it play a role in DNA repair synthesis and other DNA metabolic events through its interaction with proliferating cell nuclear antigen (PCNA) and with flap endonuclease-1 (FEN1) (Hasan et al. 2001);
[0025] it has a regulatory role for protein acetylation in base mismatch repair and maintaining genomic stability (Tini et al. 2002);
[0026] has a role in the mechanism for circadian phase control (Etchegaray et al. 2003);
[0027] generation of the polyubiquitinated forms of p53 that are targeted for proteasome degradation requires the intrinsic ubiquitin ligase activities of MDM2 and p300 (Grossman et al. 2003);

[0028] The EP300 protein is a histone acetyltransferase that regulates transcription via chromatin remodeling and is important in the processes of cell proliferation and differentiation. A role for EP300 in cancer had been implied by the fact that it is targeted by viral oncoproteins (Arany et al., 1995), it is fused to MLL in leukemia (Ida et al., 1997), and 2 missense sequence alterations in EP300 were identified in epithelial malignancies (Muraoka et al., 1996). Gayther et al. (2000) described EP300 mutations that predicted a truncated protein in 6 (3%) of 193 epithelial cancers analyzed. Of these 6 mutations, 2 were in primary tumors (a colorectal cancer and a breast cancer) and 4 were in cancer cell lines (colorectal, breast, and pancreatic). In addition, they identified a somatic in-frame insertion in a primary breast cancer and missense alterations in a primary colorectal cancer and 2 cell lines (breast and pancreatic). Inactivation of the second allele was demonstrated in 5 of the 6 cases with truncating mutations and in 2 other cases. The data showed that EP300 is mutated in epithelial cancers and provided the first evidence that it behaves as a classic tumor suppressor gene.

### 7. GPR24

[0029] The protein encoded by GPR24 gene is a member of the G protein-coupled receptor family 1, an integral plasma membrane protein which binds melanin-concentrating hormone. The encoded protein can inhibit cAMP accumulation and stimulate intracellular calcium flux, and is probably involved in the neuronal regulation of food consumption. Although structurally similar to somatostatin receptors, the protein does not seem to bind somatostatin. The protein encoded by the GPR24 gene is also termed in scientific literature as SLC1, MCH1R, MCHR1.

[0030] The somatostatin receptors (SSTRs) are a family of G protein-coupled receptors which bind to somatostatin peptides. Kolakowski et al. (1996) identified an EST sequence with significant homology to the SSTRs that does not bind somatostatin. They cloned the gene corresponding to this EST from a human genomic library. Sequencing of a genomic clone, which they termed SLC1, revealed a full-length and intronless open reading frame encoding a 402-amino acid protein. Its transmembrane regions are approximately 40% identical to other members of the SSTR family, including several residues considered to form the ligand-binding pocket of SSTRs. Northern blot analysis detected a single 2.4-kb transcript with greatest abundance in the human brain, particularly in the frontal cortex and hypothalamus. These regions are associated with emotion, memory, and sensory perception. Kolakowski et al. (1996) expressed the SLC1 receptor in COS-7 cells and found that it does not bind to somatostatin peptides. They identified a polymorphic CA repeat in the 5-prime untranslated region of this gene, and they used fluorescence in situ hybridization to map the gene to 22q13.3.

[0031] Chambers et al. (1999) used a reverse pharmacology approach to identify the natural cognate ligand for SLC1. They expressed the receptor in HEK293 cells and screened against a large library of known bioactive substances, including over 500 naturally occurring or putative neuropeptides. In this screen, melanin-concentrating hormone (MCH) was the only substance to produce a robust, dose-dependent (EC-50=3.72 nM), transient elevation of intracellular calcium in HEK293 cells transiently transfected with SLC1.

[0032] MCH can act as a functional antagonist of alpha-melanocyte-stimulating hormone (alpha-MSH) in a diverse range of animal species and physiologic roles. In mammals, MCH is orexigenic and alpha-MSH is anorexigenic. Chambers et al. (1999) tested alpha-MSH at up to 10-mM concentration and no agonistic or antagonistic interaction with SLC1 was observed. Together with the observation that MCH could not displace alpha-MSH from melanocortin receptors, these results supported the idea that the functional, mutually antagonistic effects of alpha-MSH and MCH are mediated by their interaction at separate receptors. Using in situ hybridization, Chambers et al. (1999) demonstrated that SLC1 is widely and strongly expressed in the rat brain. There were clear mRNA signals in the olfactory tubercle, cerebral cortex, substantia nigra, basal forebrain, CA1, CA2, and CA3 fields of the hippocampus, amygdala, and various other nuclei in the hypothalamus, thalamus, midbrain, and hindbrain. There were also strong signals in the ventromedial and dorsomedial nuclei of the hypothalamus, areas widely recognized as being involved in feeding behavior.

[0033] Saito et al. (1999) identified SLC1 as an MCH hormone receptor using a different technique and found similar EC-50 and brain distribution for MCHR1 (SLC1).

[0034] Borowsky et al. (2002) showed that the selective high-affinity MCH1R (MCHR1) receptor antagonist SNAP-7941 inhibited food intake stimulated by central administration of MHC, reduced consumption of palatable food, and after chronic administration to rats with diet-induced obesity, resulted in a marked, sustained decrease in body weight. Borowsky et al. (2002) also showed that SNAP-7941 produced effects similar to clinically used antidepressants and anxiolytics in 3 animal models of depression/anxiety: the rat forced-swim test, rat social interaction, and guinea pig maternal-separation vocalization tests. Given these observations, the authors concluded that an MCH1R antagonist may be useful not only in the management of obesity but also as a treatment for depression and/or anxiety.

### Genetic Markers of Mental Diseases

[0035] A number of studies have been performed in the attempt to identify the genes responsible for development of mental diseases such as SCH and BPD. Among these quite a few studies focused on the finding a correlation of the polymorphism of genomic sequences with development and inheritance of mental disorders such as SCH and BPD, which would be useful in disease diagnosis and prognosis (Skibinska et al. 2004; Xi et al. 2004; Sinibaldi et al. 2004; Li et al., 2004). However, there were so far identified no reliable genetic markers in association with the diseases so far.

### SUMMARY OF INVENTION

[0036] The authors of the present invention for the first time herein
[0037] 1) described a strong correlation between polymorphism(s) of selected genes mapped to chromosome 22q13 such as the NHP2L1, PACSIN2, SERHL, PIPPIN, BRD1, EP300, FAM19A5 and/or GPR24 genes, and a predisposition to SCH and/or BPD, proposed to use said polymorphism(s) for diagnosis/prognosis of a predisposition of an individual to SCH and/or BPD, and suggested said polymorphisms, said genes, their gene products and related pathways/interacting genes and gene products as targets for medical treatment of SCH and/or BDP and in the search for new drug candidates for medical treatment of SCH and/or BPD;
[0038] 2) described the association of specific haplotypes of the identified polymorphisms with a predisposition to SCH and/or BPD and proposed to use haplotype analysis as a mean in diagnosis/prognosis of a predisposition to SCH and/or BPD and the SNPs of said haplotypes as targets for medical treatment of SCH and/or BPD and in the search for new drug candidates for medical treatment of SCH and/or BPD;
[0039] 3) described single nucleotide polymorphisms (SNPs) mapped to the genes of chromosome 22q13 which are in linkage disequilibrium with the polymorphisms of the BRD1, NHP2L1, PACSIN2, SERHL, PIPPIN, EP300, FAM19A5 and GPR24 genes associated with SCH and/or BPD, and proposed to use the latter SNPs as diagnostic/prognostic markers of a predisposition to SCH and/or BPD and targets for medical treatment SCH and/or BPD and in the search for new drug candidates for medical treatment of SCH and/or BPD;
[0040] 4) described new etiologic factors, such as transcription and translation products of the above genes containing polymorphism(s), associated with SCH and/or BDP, and provided methods for diagnosis, prognosis and treatment of SCH and/or BPD comprising a step of identification such factor in a sample from a patient and/or a step of modulating biological activity of such factor a compound described herein;
[0041] 5) provided a method of determining a predisposition/no predisposition to/protection against SCH and/or BPD and a method for diagnosis of said diseases, said methods comprising determining a polymorphism of the BRD1, NHP2L1, PACSIN2, SERHL, PIPPIN, EP300, FAM19A5 and GPR24 genes and/or a polymorphism of another gene of chromosome 22q13, said polymorphisms being in linkage disequilibrium;
[0042] 6) provided a method for gene therapy treatment of SCH and/or BPD, said method comprising providing a gene therapy vector comprising a DNA sequence of the invention, e.g. a DNA sequence including the protective allele of a polymorphism being associated with SCH and/or BPD;
[0043] 7) provided a method for identification of new drug candidate compounds for the treatment of SCH and/or BPD, said method comprising screening compounds for a capability of inhibiting/modulating biological activity of the BRD1, NHP2L1, PACSIN2, SERHL, PIPPIN, EP300, FAM19A5 and GPR24 genes and/or products of said genes, said activity being associated with manifestation/predisposition of/to SCH and/or BDP;
[0044] 8) provided diagnostic/prognostic kits for diagnosis/prognosis of SCH and/or BPD;
[0045] 9) provided a method for estimating the likelihood of developing SCH and/or BPD in an individual comprising a step of determining the allele of an SNP of the BRD1, NHP2L1, PACSIN2, SERHL, PIPPIN, EP300, FAM19A5 and GPR24 genes, said SNP being associated with a predisposition of an individual to SCH and/or BPD.

[0046] Accordingly, in the first aspect the invention relates to a method for determining a predisposition/no predisposition to a mental disease in a subject comprising determining in a biological sample isolated from said subject one or more polymorphisms in the chromosome regions containing the NHP2L1, PACSIN2, SERHL, PIPPIN, BRD1, EP300, FAM19A5 and/or GPR24 genes, or in a translational or transcriptional product from said regions, said polymorphism being indicative of said predisposition/no predisposition.

[0047] The present inventors have discovered that polymorphisms, such as SNPs, identified in the coding and/or non-coding regions of the NHP2L1, PACSIN2, SERHL, PIPPIN, BRD1, EP300, FAM19A5 and/or GPR24 genes are strongly associated with the presence or absence of some mental diseases such as SCH and BPD. Thus, detecting the presence or absence of one or more alleles of the SNPs of the present invention amounts to determining a predisposition to having or not having a mental disease. It thus follows that determining the presence of a specific allele amounts to determining a predisposition to having/not having a mental disease. According to the invention the strength of the association between the presence/absence of a specific SNP in the above genes and the diseases is very strong.

[0048] Diagnosis of individuals for genetic predisposition to mental diseases, such as SCH and/or BPD is very important so that they can be given the best treatment and adapt their lifestyle according to their genetic predisposition.

[0049] The authors of the present invention performed haplotype analysis of the identified SNPs and found out that the coincidence of some haplotypes in association with a particular disease is higher then the coincidence of another haplotype and the disease. Thus, the invention also relates to specific haplotypes of the identified SNPs. Moreover, it is expected that with the information made available by the inventors, more polymorphisms in the NHP2L1, PACSIN2, SERHL, PIPPIN, BRD1, EP300, FAM19A5 and/or GPR24 genes will be found predisposing to mental diseases, such as SCH and/or BPD. Therefore, all polymorphisms being in linkage disequilibrium with the identified in the present invention SNPs in the chromosome regions adjusted to the genes of the invention are included in the scope of the protection as diagnostic markers of the predisposition to a mental disease, in particular SCH and/or BPD. Moreover, some particular SNPs found in other genes than the genes of the invention and described herein as a part of specific haplotypes associated with a predisposition to SCH and/or BPD are also concerned by the invention as genetic markers of said predisposition.

[0050] The inventors have defined the alleles of the described SNPs, which when expressed in an individual have either promotional or no effect on developing a mental disease (the susceptibility or protective allele correspondingly) The application thus also provides a method for estimating the likelihood for development of SCH and/or BPD by analysing the allele variance of the SNPs associated with SCH and/or BPD present in an individual.

[0051] In a further aspect the invention relates to isolated oligonucleotide sequences comprising at least 10 contiguous nucleotides being 100% identical to a subsequence of the NHP2L1, PACSIN2, SERHL, PIPPIN, BRD1, EP300, FAM19A5 and/or GPR24 genes comprising or adjacent to a polymorphism of the invention, said polymorphism or mutation being associated to a mental disease.

[0052] As the present inventors have determined that the NHP2L1, PACSIN2, SERHL, PIPPIN, BRD1, EP300 and GPR24 genes are etiological factors in mental diseases it is important to be able to detect and correct or suppress any polymorphism in the genes which is correlated to these diseases. The isolated oligonucleotides may be used as probes for detection of the polymorphisms and/or as primer pairs for amplification of a target nucleotide sequence and/or as part of a gene therapy vector for administration to a patient suffering from mental diseases, such as SCH and/or BPD.

[0053] In a further aspect the invention relates to a kit for predicting an increased risk of a subject of developing mental diseases, such as SCH and/or BPD or for other diagnostic and classification purposes of SCH and/or BPD comprising at least one probe comprising at least two nucleic acid sequences as defined above.

[0054] These kits which may further comprise buffers and primers and reagents can be used for diagnosing the polymorphisms and mutations which correlate to mental diseases of the invention.

[0055] The invention also relates to variant proteins comprising variants which correspond to the identified in the application polymorphisms of the corresponding genes. These variant proteins may also be used for diagnosis of the described herein mental diseases.

[0056] According to a further aspect the invention relates to antibodies capable of selectively binding to the variant proteins as defined above with a different (such as lower or higher) binding affinity than when binding to the polypeptide having the amino acid sequence of wild type protein.

[0057] These antibodies may be used in diagnosing individuals with the polymorphisms. It is also envisaged that such specific antibodies may be used for treating patients carrying the variant protein.

[0058] In further aspects the present invention relates to methods of treating patients suffering from mental disorders, in particular SCH and/or BPD. Among the therapeutic methods, one method relates to a method of treating SCH and/or BPD in a subject being diagnosed as having a predisposition according to the invention, comprising administering to said subject a therapeutically effective amount of a gene therapy vector. The invention also relates to a gene therapy vector itself, said vector being capable of altering the polymorphism in cells of a subject being diagnosed as having a predisposition according to the invention, or being capable of correcting, suppressing, supporting or changing the expression of the NHP2L1, PACSIN2, SERHL, PIPPIN, BRD1, EP300, FAM19A5 and/or GPR24 genes in cells of a subject suffering from said diseases.

[0059] With the advent of gene therapy it has become possible to suppress and/or to eliminate the effects of a polymorphism by administering to a subject a gene therapy vector which either alters the polymorphism or suppresses the transcription and/or translation from the gene. Such gene therapy vectors have the advantage of being highly specific. Therapeutic methods of treatment of patients suffering from SCH and/or BPD of the invention also include methods of treatment comprising a step of modulating the activity of products of the genes comprising a polymorphism associated with SCH and/or BPD.

### DEFINITIONS

[0060] Gene/gene sequence:

[0061] A compilation of
[0062] the genomic sequences which are transcribed into a transcriptional entity
[0063] the genomic sequences in between
[0064] the genomic sequences involved in regulation of expression and splicing of the gene comprising at least 2000 bp upstream and downstream from the transcribed entity.

[0065] The present invention relates to the genes identified in the NCBI database (http://www.ncbi.nlm.nih.gov) as

### GeneID: 4809 (NHP2L1)

### GeneID: 11252 (PACSIN2)

### GeneID: 94009 (SERHL)

### GeneID: 27254 (PIPPIN)

### GeneID: 23774 (BRD1)

### GeneID: 2033 (EP300)

### GeneID: 2847 (GPR24)

### GeneID: 25817 (FAM19A5)

[0066] Genomic sequences of the above genes (http://genome.ucsc.edu/) are identified in the present invention as

| | |
|---|---|
| NHP2L1 gene | SEQ ID NO: 1 |
| PACSIN2 gene | SEQ ID NO: 2 |
| SERHL gene | SEQ ID NO: 3 |
| PIPPIN gene | SEQ ID NO: 4 |
| BRD1 gene | SEQ ID NO: 5 |
| EP300 gene | SEQ ID NO: 6 |
| GPR24 gene | SEQ ID NO: 7 |
| FAM19A5 | SEQ ID NO: 94 |

[0067] The term “chromosome region containing a gene” means herein a part of a human chromosome containing a gene of the invention and nucleotide sequences of 2 to 2000 base pairs adjacent to both ends of the defined gene sequence (SEQ ID NO: 1-7 and 94), wherein one end of the gene corresponds to the first nucleotide of the gene sequence, and another end corresponds to the last nucleotide of the gene sequence.

[0068] The term “adjacent” is used in connection with
[0069] (i) a gene sequence to indicate a nucleotide sequence/chromosome region that is sufficiently closely located to said gene sequence in a chromosome, such as for instance less then 1 000 000 for example within 900 000-200 000 nucleotide positions, such as 100 000, e.g. less then 90 000, such as less then 80 000, e.g. less then 70 000, such as less then 60 000, e.g. from 10 000 to 50 000, e.g. 20 000 or 10 000 nucleotide positions, or from 1 to 10 000 nucleotide positions. It is preferred that the adjacent region is in linkage disequilibrium with said gene sequence;
[0070] (ii) an oligonucleotide sequence to indicate that said oligonucleotide sequence recognises a sequence that is sufficiently closely located to a specific nucleotide of interest for the oligonucleotide sequence to be suitable for the desired detection technique, such as for instance as a primer for amplification of a target nucleotide sequence. Preferably, adjacent means less than 500, such as less than 400, e.g. less than 300, such as less than 200, e.g. less than 100, such as less than 50 nucleotide positions away from the nucleotide or nucleotide sequence of interest.

[0071] As used herein, the term “coding sequence” refers to that portion of a gene that encodes the amino acid sequence of a protein. Exons contain the coding sequence of the gene.

[0072] Coding sequences of the above genes (cDNA) are identified herein as

| | |
|---|---|
| NHP2L1 cDNA | SEQ ID NO: 8 |
| PACSIN2 cDNA | SEQ ID NO: 9 |
| SERHL cDNA | SEQ ID NO: 10 |
| PIPPIN cDNA | SEQ ID NO: 11 |
| BRD1 cDNA | SEQ ID NO: 12 |
| EP300 cDNA | SEQ ID NO: 13 |
| GPR24 cDNA | SEQ ID NO: 14 . . . |
| FAM19A5 | SEQ ID NO: 95 |

[0073] The promoter, UTR and intron regions referred herein as the “non-coding region(s)/sequence(s)” of the given genes. As used herein, “intron” refers to a DNA sequence present in a given gene that is spliced out during mRNA maturation. The term “promoter region” refers to the portion of DNA of a gene that controls transcription of the DNA to which it is operatively linked. The promoter region includes specific sequences of DNA that are sufficient for RNA polymerase recognition, binding and transcription initiation. This portion of the promoter region is referred to as the promoter. In addition, the promoter region includes sequences that modulate the recognition, binding and transcription initiation activity of the RNA polymerase. The UTR regions of the gene corresponds to the 5′ and 3′ sequences that are transcribed into (mature) mRNA but are not translated into protein.

[0074] The term “fragment” when used in connection with nucleotide sequences means any fragment of the nucleotide sequence consisting of at least 20 consecutive nucleotides of that sequence.

[0075] As used herein, the term “polymorphism” refers to the coexistence of more than one form of a gene or portion thereof. A portion of a gene of which there are at least two different forms, i.e., two different nucleotide sequences, is referred to as a “polymorphic region of a gene”. A polymorphic region can be a single nucleotide, the identity of which differs in different alleles. Such polymorphism is referred herein as “single nucleotide polymorphism” or SNP. A polymorphic region also can be several nucleotides in length. A gene having at least one polymorphic region is referred to as a “polymorphic gene”.

[0076] SNPs, which are known in the art, are identified herein with the numbers corresponding to the refSNP ID NOs (rs numbers) of the NCBI SNP database (http://www.ncbi.nlm.nih.gov/SNP/) and UCSC Genome SNP database (http://www.genome.ucsc.edu/), for example such as

rs11561, rs5758405 rs8779, rs132806,
rs2068943, rs2267487
rs881542, rs926333, rs1060387
rs1006407
rs4468, rs138855, rs2239848, rs138880, rs138881
rs20551, rs2294976, rs2076578, rs1046088
rs133068, rs133069
rs133070, rs1330739.

[0077] By the term “SNP type” is meant the promoter, UTR, intron, synonymous or non-synonymous SNP.

[0078] By “promoter SNP” is meant an SNP located in the promoter region of a gene. This type of SNP may affect expression of the gene.

[0079] By the term “UTR SNP” is meant a SNP located in part of the genome that is transcribed into mRNA, but this part of the mRNA is not translated into protein. SNPs in this part of the genome may for example affect splicing, regulation of transcription, the fate of the mRNA in the cell changing the stability or the location where the mRNA is transported.

[0080] By the term “Intron SNP” is meant a SNP located in an intronic region of the gene. Introns are spliced out of the mature mRNA before it leaves the cell nucleus. This type SNP may affect splicing of the primary transcript into the mature mRNA and thereby influence what is translated into protein (e.g. exon-skipping leading to defect protein, or change of reading-frame leading to truncated protein, or nonsense-mediated-decay). Intron SNPs may also have a regulatory potential.

[0081] By the term “synonymous SNP” (syn) is meant a SNP which is associated with the change of a nucleotide in the (coding) exon sequence that doesn't lead to the change of an amino acid in the protein encoded by the gene. A syn-SNPs may have an impact on the regulation of the gene and on splicing e.g. by introduction of cryptic splice sites

[0082] The term “non-synonymous SNP” (non-syn) designates a SNP which is associated with a nucleotide change in the coding DNA sequence that leads to the change of an amino acid in the sequence of the encoded protein. This type of SNP may lead to a change in the function and/or structure of the protein.

[0083] As used herein, “allele”, which is used interchangeably herein with “allelic variant” refers to alternative forms of a gene or portions thereof. Alleles occupy the same locus or position on homologous chromosomes. When an individual has two identical alleles of a gene, the individual is said to be homozygous for the gene or allele.

[0084] When an individual has two different alleles of a gene, the individual is said to be heterozygous for the gene or alleles. Alleles of a specific gene can differ from each other in a single nucleotide, or several nucleotides, and can include substitutions, deletions, and insertions of nucleotides. An allele of a gene also can be a form of a gene containing a mutation.

[0085] By the term “susceptibility/risky allele” is in the present content meant the allele of a polymorphism, e.g. SNP, which is associated with a predisposition of an individual carrying this allele for development of a disease, e.g. SCH and/or BPD. By the term “protective allele” is meant the allele of a polymorphism, e.g. SNP, said polymorphism being associated with a predisposition of an individual for development of a disease, the presence of which in the genetic material from an individual, e.g. a DNA sample, indicates no predisposition of an individual carrying this allele for development of a disease, e.g. SCH and/or BPD.

[0086] As used herein, “predisposition” means that an individual having a particular genotype and/or haplotype has a higher likelihood than one not having such a genotype and/or haplotype for a particular condition/disease as one of the described herein.

[0087] As used herein, the term “haplotype” refers to a set of closely positioned alleles present on one chromosome which tend to be inherited together (not easily separable by recombination).

[0088] As used herein, the term “genetic marker” refers to an identifiable physical location on a chromosome (e.g., single nucleotide polymorphism (SNP), restriction enzyme cutting site) whose inheritance can be monitored. Markers can be expressed regions of DNA (genes) or some segment of DNA with no known coding function but whose pattern of inheritance can be determined.

[0089] As used herein, the term “linkage” refers to an association in inheritance between genetic markers such that the parental genetic marker combinations appear among the progeny more often than the non-parental.

[0090] As used herein, the term “linkage disequilibrium” (LD) means that the observed frequencies of haplotypes in a population does not agree with haplotype frequencies predicted by multiplying the frequencies of individual genetic marker alleles in each haplotype; LD means that there exist correlations among neighbouring alleles, reflecting ‘haplotypes’ descended from single, ancestral chromosomes.

[0091] Target nucleic acid: a nucleic acid isolated from an individual and comprising at least one polymorphism identified in the present invention as well as further nucleotides upstream or downstream. The target nucleic acid can be used for hybridisation, for sequencing or other analytical purposes.

[0092] By the term “gene products” is meant herein products of gene transcription, such as an mRNA transcript and said mRNA transcript splicing products, and products of gene translation, such as polypeptide(s) translated from any of the gene mRNA transcripts and various products of post-translational processing of said polypeptides, such as the products of post-translational proteolytic processing of the polypeptide(s) or products of various post-translational modifications of said polypeptide(s).

[0093] Alignment. When reference is made to alignment of protein sequences alignment is carried out using the MultAlin algorithm with default settings (“Multiple sequence alignment with hierarchical clustering”, F Corpet, 1988, Nucl. Acids Res., 16 (22), 10881-10890), which is available at the internet address: http:/prodes.toulouse.inra.fr/multalin/multalin.html.

### Conservative Amino Acid Substitutions:

[0094] Substitutions within the groups of amino acids are considered conservative amino acid substitutions. Substitutions among the groups of amino acids are considered non-conservative amino acid substitutions.

P, A, G, S, T (neutral, weakly hydrophobic)
Q, N, E, D, B, Z (hydrophilic, acid amine)
H, K, R (hydrophilic, basic)
F, Y, W (hydrophobic, aromatic)
L, I, V, M (hydrophobic)
C (cross-link forming)

[0095] SCHIZOPHRENIA (SCH) A mental disorder or heterogeneous group of mental disorders (the schizophrenias or schizophrenic disorders) comprising most major psychotic disorders and characterized by disturbances in form and content of thought (loosening of associations, delusions and hallucinations) mood (blunted, flattened or inappropriate affect), sense of self and relationship to the external world (loss of ego boundaries, dereistic thinking and autistic withdrawal) and behavior (bizarre, apparently purposeless and stereotyped activity or inactivity).

[0096] BIPOLAR AFFECTIVE DISORDER (BPD) is one of the most common, severe, and persistent mental diseases. It is characterized by periods of deep, prolonged, and profound depression that alternate with periods of excessively elevated and/or irritable mood known as mania. The symptoms of mania include a decreased need for sleep, pressured speech, increased libido, reckless behaviour without regard for consequences, grandiosity, and severe thought disturbances, which may or may not include psychosis.

### DESCRIPTION OF DRAWINGS

[0097] FIG. 1 presents the results of statistical evaluation of the coincidence of the presence of specific haplotypes comprising the SNPs of the BRD1 gene and occurrence of the SCH, BPD or combined SCH and BPD phenotype.

[0098] FIG. 2 presents the results of statistical evaluation of the coincidence of the presence of specific haplotypes comprising the SNPs of the GPR24 gene and selected SNPs positioned on chromosome 22q and occurrence of the SCH, BPD or combined SCH and BPD phenotype.

[0099] FIG. 3 illustrates one way to connect the cases from the Faroe Islands to a common ancestor. The sex of the individuals in the pedigree is not distinguished.

[0100] FIG. 4 shows the statistical analysis of the observed distribution of the overall 1-5 marker haplotypes in the sample from the Faeroe Islands calculated using the program CLUMP. Significant associations with p-values less than 0.05 and less than 0.01 are shaded in light gray and dark grey, respectively.

[0101] FIG. 5 presents the degree of pair-wise Linkage Disequilibrium (LD) between the SNPs genotyped in the Scottish case-control sample calculated using LDmax from the GOLD software package.

[0102] FIG. 6 demonstrates the results of association analysis of haplotypes comprising 1-5 SNPs (BPD and SCH vs. controls)

[0103] FIG. 7 demonstrates the results of association analysis of haplotypes comprising 1-5 SNPs (SCH vs. controls)

[0104] FIG. 8 demonstrates the results of association analysis of haplotypes comprising 1-5 SNPs (BPD vs. controls)

[0105] FIG. 9: BRD1 immunostaining of adult rat, rabbit and human cerebral cortex. The 3 species exhibit a similar BRD1 staining pattern. (A) Rat cerebral cortex layer I-VI, (B) Rabbit cerebral cortex layer II-VI, (C) Human cerebral cortex layer II-V, (D) Rat layer II neurons, (E) Rabbit layer VI neurons, (F) Human layer V neurons.

[0106] FIG. 10: Confocal microscopic images of BRD1 immunoflouresence stained rat cerebral cortex layer II-III neurons (A), TO-PRO-3 stained cell nuclei in the same area (B), BRD1 and TO-PRO-3 double-stained section (C). The BRD1-immunoreactivity is located both in the cytosol and the nucleus of the neurons whereas surrounding glial cells with small TO-PRO-3 positive nuclei seem BRD1-negative.

[0107] FIG. 11: BRD1-positive neurons in different adult rat and rabbit CNS areas. (A) BRD1-positive pyramidal cells in CA1 of the rabbit hippocampus. Note the prominent staining of the proximal pyramidal dendrites in stratum radiatum. (B) Rabbit striatum. (C) Rat ventromedial hypothalamic nucleus. (D) Rat cerebellar cortex, note BRD1-staining of granule cells, purkinje cells, and molecular layer interneurons. (E) Rat brainstem trigeminal motor nucleus. (F) Caudal part of the trigeminal spinal nucleus in the rat cervical spinal cord.

[0108] FIG. 12: BRD1 immunostaining of subventricular myelencephalon from fetal pig of embryonic day 60 (A-C) and day of birth/embryonic day 115 (D-F). (A) Next to the lumen of the 4^{th} ventricle, a cell rich neuroepithelial layer is noted wherefrom maturing neuroblasts migrate into the surrounding part of the myelencephalon. (B) Close view of the neuroepithelial layer seen in A. The neuroepithelial cells display prominent nuclear BRD1 immunopositivity. (C) Close view of maturing neuroblasts seen in A. Prominent BRD1-staining is seen both in the nucleus and the surrounding cytosol. (D) Subventricular medulla at the day of birth corresponding to the area depicted in A, displays less prominent BRD1 immunoreactivity. (E) Close view of the subventricular layer seen in D. The subventricular cells display a weaker nuclear BRD1-immunoreactivity than seen in B. (F) Close view of the medullar neurons seen in D. Note the pronounced decrease in nuclear BRD1 immunoreactivity.

[0109] FIG. 13: Relative quantification of BRD1 mRNA expression in terms of fold changes (2^{-ΔΔC}^{_{T}} and 2^{-ΔC}^{_{T}}) found by analysis of variance (left panel) contrasting to embryonic day 115 the mean threshold difference from each of the other days. The significance of the contrasts is indicated (*: p<0.05, **: p<0.01 and ***: p<0.001) with p-values adjusted for the number of contrasts tested using the Sidák method. A polynomial regression model up to third order (right panel) was determined using a forward inclusion stepwise procedure. The significance of the highest order term is indicated.

### DETAILED DESCRIPTION OF THE INVENTION

### Gene Polymorphism

[0110] In the first aspect the invention relates to a method for determining a predisposition to a mental disease in a subject comprising determining in a biological sample isolated from said subject one or polymorphisms in the chromosome regions containing the NHP2L1, PACSIN2, SERHL, PIPPIN, BRD1, EP300, FAM19A5 and/or GPR24 genes, or in a translational or transcriptional product from said regions, said polymorphism being indicative of said predisposition.

[0111] The invention relates to a mental disease being a disease characterised by at least two symptoms, preferably three or more symptoms, which are related to schizophrenia (SCH) and/or bipolar disorder (BPD). SCH and BPD are preferred mental diseases of the invention. In some embodiments a preferred mental disease is characterised by symptoms of both SCH and BPD.

### Position of Polymorphisms

[0112] In one embodiment the present invention relates to polymorphisms of the above identified genes, wherein the polymorphisms are located in the non-coding regions of the genes, such as the regions controlling expression of the genes, for example promoter and UTR regions, and the regions controlling the splicing of the gene transcript, such as introns or exon/intron boundaries. Such polymorphisms according to the invention may influence expression of the gene or affect the splicing or maturation of the gene transcript, mRNA.

[0113] In another embodiment the invention relates to polymorphisms locates in the coding regions of the gene, such as exons. Such polymorphisms according to the invention may lead to the production of variant proteins. Variant proteins are the proteins, amino acid sequence of which contains an amino acid change, such as substitution(s), insertion(s) and/or deletion(s), corresponding to the polymorphism(s) of the gene. A variant protein may have functional activity altered due to the latter gene polymorphism.

[0114] In one aspect the present invention relates to a method comprising the determination of one or more polymorphisms in the chromosome regions, said regions containing the NHP2L1, PACSIN2, SERHL, PIPPIN, BRD1, EP300, FAM19A5 and/or GPR24, and relating said one or more polymorphisms to the predisposition to SCH and BPD.

[0115] The polymorphisms may be located either/both in the coding region and/or non-coding region of said genes. Another aspect of the invention relates to a method for determining one or more polymorphisms in the chromosome regions, which are in linkage disequilibrium with the polymorphisms of the above genes, and relating said one or more polymorphisms to a predisposition to SCH and/or BPD. The polymorphisms may be located in one individual gene as well as in two or more different individual genes. The polymorphism(s) may be located either or both in the coding and/or non-coding regions of these genes.

[0116] In further embodiments a predisposition to a mental disease comprises determining more than one polymorphism in any identified herein genes, or may be determined specifically for a selected disease by determining two or more selected polymorphisms of the invention, wherein said polymorphisms have stronger correlation with said selected disease then other polymorphisms identified in the present application. Thus, the invention relates to determining specific haplotypes comprising two or more identified herein polymorphisms which are associated with a specific mental disease, in particular SCH or BPD. The specific haplotypes of the invention may further comprise one or more polymorphisms of the DNA sequences adjusted to the genes of the invention.

[0117] Preferably, the invention relates to polymorphism of DNA being an SNP.

[0118] Preferred SNPs according to the invention are the SNPs having refSNP Nos.

rs11561, rs5758405 rs8779, rs132806,
rs2068943, rs2267487
rs881542, rs926333, rs1060387
rs1006407, rs6002408
rs4468, rs138855, rs2239848, rs138880, rs138881
rs20551, rs2294976, rs2076578, rs1046088
rs133068, rs133069, rs133070, rs133073

[0119] The above identified group of SNPs consists of the SNPs identified in the genomic sequences of the NHP2L1, PACSIN2, SERHL, PIPPIN, BRD1, EP300, FAM19A5 and/or GPR24 (SEQ ID NO: 1-7 and 94).

[0120] Positions of the SNPs within the genomic sequences of the genes (SEQ ID NOS: 1-7 and 94) are identified in Table 1.

TABLE 1

| | | Chromosome | | Nucleotide No | | Type of |
|---|---|---|---|---|---|---|
| Gene | SEQ ID NO | ID | SNP ID | (position of SNP*) | SNP | SNP |
| NHP2L1 | 1 | 22q13.2 | rs8779 | 40313315 | C/T | UTR |
| NHP2L1 | 1 | 22q13.2 | rs132806 | 40313832 | C/T | UTR |
| NHP2L1 | 1 | 22q13.2 | rs11561 | 40314236 | T/C | Non-syn |
| NHP2L1 | 1 | 22q13.2 | rs5758405 | 40319420 | C/A | Intron |
| PACSIN2 | 2 | 22q13.2 | rs2068943 | 41587252 | C/T | Promoter |
| PACSIN2 | 2 | 22q13.2 | rs2267487 | 41642330 | C/T | Promoter |
| SERHL | 3 | 22q13.2 | rs881542 | 41126941 | C/G | Prom |
| SERHL | 3 | 22q13.2 | rs926333 | 41128686 | A/G | Non-syn |
| SERHL | 3 | 22q13.2 | rs1060387 | 41136001 | C/T | Non-syn |
| PIPPIN | 4 | 22q13.2 | rs6002408 | 40210909 | C/T | UTR |
| PIPPIN | 4 | 22q13.2 | rs1006407 | 40215071 | C/T | UTR |
| BRD1 | 5 | 22q13.3 | rs4468 | 48386988 | T/C | UTR |
| BRD1 | 5 | 22q13.3 | rs138855 | 48417818 | G/C | Intron |
| BRD1 | 5 | 22q13.3 | rs2239848 | 48436090 | G/A | Syn |
| BRD1 | 5 | 22q13.3 | rs138880 | 48437947 | A/C | Promoter |
| BRD1 | 5 | 22q13.3 | rs138881 | 48439818 | G/A | Promoter |
| EP300 | 6 | 22q13.2 | rs20551 | 39781047 | A/G | Non-syn |
| EP300 | 6 | 22q13.2 | rs2294976 | 39807747 | C/A | Intron |
| EP300 | 6 | 22q13.2 | rs2076578 | 39812648 | C/T | Intron |
| EP300 | 6 | 22q13.2 | rs1046088 | 39817422 | A/C | Non-syn |
| GPR24 | 7 | 22q13.2 | rs133068 | 39317446 | C/G | Promoter |
| GPR24 | 7 | 22q13.2 | rs133069 | 39317501 | A/C | Promoter |
| GPR24 | 7 | 22q13.2 | rs133070 | 39317812 | A/G | Promoter |
| GPR24 | 7 | 22q13.2 | rs133073 | 39318734 | C/T | Syn |
| FAM19A5 | 84 | 22q13.3 | Rs132234 | 47424523 | C/T | Intron |
| FAM19A5 | 84 | 22q13.3 | Rs3752466 | 47466709 | C/T | 3′UTR |

[0121] According to the invention the above SNPs are genetic markers of a mental disease of the invention. * Nucleotide position in a genomic sequence is given according to the sequences of the UCSC database, July 2003 assembly (http://www.genome.ucsc.edu/).

[0122] The invention describes several haplotypes of the above SNPs in association with SCH and/or BPD.

[0123] The following is non-limited examples of specific haplotypes of the invention:

[0124] A three SNP haplotype consisting of the SNPs rs133069, rs133070, rs133073 of the GRP24 gene is according to invention indicative of BPD,

[0125] A four SNP haplotype consisting of rs133069, rs133070, rs133073 rs133068 of the GRP24 gene is according to invention indicative of SCH.

[0126] More examples of the SNPs and haplotypes of the invention are shown in FIGS. 1 and 2 of the present application and in Table 2 below.

TABLE 2

| Gene | SNP ID NO | SNP | |
|---|---|---|---|
| BRD1 | rs4468 | T/C | C over-represented in SCH/Part of haplotype associated with |
| | | | SCH and combined BPD&SCH |
| BRD1 | rs138855 | G/C | Part of haplotype associated with SCH and BPD |
| BRD1 | rs2239848 | G/A | Part of haplotype associated with SCH, BPD and combined |
| | | | BPD&SCH |
| BRD1 | rs138880 | A/C | C over-represented in BPD and SCH/Part of haplotype |
| | | | iassociated with SCH, BPD and combined BPD&SCH |
| BRD1 | rs138881 | G/A | Part of haplotype associated with SCH, BPD and combined |
| | | | BPD&SCH |
| EP300 | rs20551 | A/G | A over-represented in BPD/part of haplotype associated with |
| | | | BPD |
| EP300 | rs2294976 | C/A | part of haplotype associated with BPD |
| EP300 | rs2076578 | C/T | part of haplotype associated with BPD |
| EP300 | rs1046088 | A/C | A over-represented in BPD/part of haplotype associated with |
| | | | BPD |
| GPR24 | rs133068 | C/G | Part of haplotype associated with SCH, BPD and Combined |
| | | | BPD&SCH |
| GPR24 | rs133069 | A/C | Part of haplotype associated with SCH, BPD and Combined |
| | | | BPD&SCH |
| GPR24 | rs133070 | A/G | Part of haplotype associated with SCH, BPD and Combined |
| | | | BPD&SCH |
| GPR24 | rs133073 | C/T | Part of haplotype associated with SCH, BPD and Combined |
| | | | BPD&SCH |
| NHP2L1 | rs8779 | C/T | Part of haplotype associated with SCH, BPD and combined |
| | | | BPD&SCH |
| NHP2L1 | rs132806 | C/T | Part of haplotype associated with SCH |
| NHP2L1 | rs11561 | T/C | C over-represented in SCH/Part of haplotype associated with |
| | | | SCH |
| NHP2L1 | rs5758405 | C/A | Part of haplotype associated with SCH |
| PACSIN2 | rs2068943 | C/T | C over-represented in SCH/Part of haplotype associated with |
| | | | SCH |
| PACSIN2 | rs2267487 | C/T | part of haplotype associated with SCH |
| SERHL | rs881542 | C/G | C over-represented in SCH |
| SERHL | rs926333 | A/G | A over-represented in SCH/Part of haplotype associated with |
| | | | SCH |
| SERHL | rs1060387 | C/T | Part of haplotype associated with SCH |
| PIPPIN | rs6002408 | C/T | Part of haplotype associated with SCH, BPD and Combined |
| | | | BPD&SCH |
| PIPPIN | rs1006407 | C/T | Part of haplotype associated with SCH, BPD and Combined |
| | | | BPD&SCH |

[0127] The invention features haplotypes of the above SNPs that are present on one chromosome, e.g. within the sequence of one particular gene, or located within the sequences of two different juxtaposed genes, which tend to be inherited together. The latter group of SNPs may for example consist of the SNPs having refSNP ID NO: rs909660, rs710193, rs1573745, rs132234, rs3752466, rs6010260, rs137931, rs137932, rs3810971, rs2272843, rs1063900, rs715519, rs916005. This group of SNPs includes the SNPs which are identified in the present invention as parts of different haplotypes, said haplotypes being associated with SCH and/or BPD (as for example shown in FIGS. 1, 2 and 4 of the present application.

[0128] In another aspect the invention relates to polymorphisms located in the chromosome regions, which do not contain the above identified genes, said polymorphisms being in linkage disequilibrium with at least one of the above identified SNPs. In particular, the invention relates to polymorphisms in the human chromosome 22q being in linkage disequilibrium with one or more polymorphisms in the NHP2L1, PACSIN2, SERHL, PIPPIN, BRD1, EP300, FAM19A5 and/or GPR24 genes, such as an SNP selected from rs11561, rs5758405 rs8779, rs132806, rs2068943, rs2267487, rs881542, rs926333, rs1060387, rs1006407, rs4468, rs138855, rs2239848, rs138880, rs138881, rs20551, rs2294976, rs2076578, rs1046088, rs133068, rs133069, rs133070, rs133073, rs6002408 as well as the microsatellites D22S922 and D22S1169

[0129] Likewise, any polymorphism of the genes being adjacent to the genes of the invention, in particular a polymorphism(s) being located within the sequence of 1 to 1 000 000 nucleotides adjacent to said genes, and is in linkage disequilibrium with any of the SNPs identified above, is in the scope of the invention. The SNPs located within 50-100 0000 nucleotides sequence adjusted to the nucleotide corresponding to the first or the last nucleotide of a sequence selected from the sequences identified as SEQ ID NO: 1-7 and 94 are preferred.

### Gene Products

[0130] The invention relates to a method for determining a predisposition to a mental disease comprising determining at least one polymorphism in any of the above genes or in transcriptional or translational products of the genes.

[0131] As used herein, the term “transcriptional product of the gene” refers to a pre-messenger RNA molecule, pre-mRNA, that contains the same sequence information (albeit that U nucleotides replace T nucleotides) as the gene, or mature messenger RNA molecule, mRNA, which was produced due to splicing of the pre-mRNA, and is a template for translation of genetic information of the gene into a protein.

[0132] As used herein, the term “translational product of the gene” refers to a protein, which is encoded by the gene.

[0133] Thus, the invention includes in the scope of protection nucleic acids comprising the coding nucleotide sequences of the above genes comprising a polymorphism and proteins comprising a polymorphism corresponding to the polymorphism of the encoding nucleic acid sequence.

[0134] In particular, the invention relates to transcriptional products of the above genes being
[0135] (i) nucleic acid sequences identified in the invention as SEQ ID NO: 8-14, or fragments thereof,
[0136] (ii) nucleic acid sequences having at least 90% identity with SEQ ID NO: 8-14, or fragments thereof,
[0137] (iii) nucleic acid sequences being complementary to any of the sequences of (i) or (ii),
   said nucleic acid sequences comprising the polymorphisms of the genomic sequences described above.

[0138] Translational products of the genes of the invention are identified herein as
[0139] (i) variant proteins corresponding to the proteins identified in the NCBI database under Ass. Nos.: NP_{—}001003796/004999 (NHP2L1) (SEQ ID NO: 87), NP_{—}009160 (PACSIN2) (SEQ ID NO: 88), NP_{—}733795 (SERHL) (SEQ ID NO: 89), NP_{—}055275 (PIPPIN) (SEQ ID NO: 90), NP_{—}055392 (BRD1) (SEQ ID NO: 91), NP_{—}001420 (EP300) (SEQ ID NO: 92), NP_{—}005288 (GPR24) (SEQ ID NO: 93), or variants, or fragments thereof,
[0140] (ii) polypeptide sequences having at least 90% identity with the variant proteins, or fragments thereof, of (i),
   said variant proteins, fragments thereof and said polypeptide sequences are comprising polymorphism corresponding to the polymorphism of the corresponding genomic sequences or transcriptional products of said genomic sequences.

[0141] Selected, but non-limited examples of protein polymorphism of the invention are given in Table 3 below:

TABLE 3

| Gene | SNP ID. | Alleles | Protein polymorphism |
|---|---|---|---|
| EP300 | rs1046088 | A/C | Gln2223Pro |
| EP300 | rs20551 | A/G | Ile997Val |
| SERHL | rs926333 | A/G | Ser46Ala |
| SERHL | rs1060387 | C/T | Ala2Val |
| NHP2L1 | rs11561 | T/C | Thr43Ala |

[0142] Thus, it is an embodiment of the invention to use the above identified variant proteins for the purpose of
[0143] i) diagnosis of SCH and/or BPD in a neuropsychiatric patient, and/or
[0144] ii) prognosis of likelihood of development of SCH and/or BPD by an individual, and/or
[0145] iii) development new drug candidates for the treatment of SCH and/or BPD, and/or
[0146] iv) therapeutic treatment of SCH and/or BPD.

### Methods of Determining Polymorphisms

### 1 SNP

[0147] Many methods (see Table 4 below) are known in the prior art for determining the presence of particular nucleotide sequences or for determining particular proteins having particular amino acid sequences. All of these methods may be adapted for determining the polymorphisms according to the present invention.

TABLE 4

| Method | Result |
|---|---|
| Restriction fragment length | Cleavage or non-cleavage based on |
| polymorphism | SNP results in difference in length |
| Amplified fragment length | Cleavage or non-cleavage based on |
| polymorphism | SNP results in difference in length |
| Mass spectrometry | Difference in molecular weight of hybrids |
| | between a probe and the different alleles |
| Single strand conformation | Different separation in gel based on |
| polymorphism (SSCP). SSCP | different conformation caused by single |
| heteroduplex. | nucleotide polymorphism. |
| Single nucleotide extension | Difference in signal through incorporation |
| | of differently labelled nucleotide or |
| | labelled/non-labelled nucleotide |
| Sequencing | Difference in sequence |
| Hybridisation | Hybridisation or non-hybridisation at high |
| | stringency. Often detected by using |
| | differently labelled probes. |
| Determination of Tₘ profile | Difference in Tₘ profile between target |
| | and homologous vs. non-homologous |
| | probe. |
| Cleavage of | |
| single-stranded DNA | |
| Denaturing HPLC | DHPLC is based on resolving |
| | heteroduplex from homoduplex DNA |
| | fragments produced by PCR |
| | amplification using temperature- |
| | modulated heteroduplex analysis. |
| TAQMAN | PCR based technique. |

[0148] One common method for detecting SNPs comprises the use of a probe bound to a detectable label. By carrying out hybridisation under conditions of high stringency it is ensured that the probe only hybridises to a sequence which is 100% complementary to the probe. According to the present invention this method comprises hybridising a probe to a target nucleic acid sequence comprising at least one of the SNPs at the positions identified in Table 1 (see above). For other polymorphisms or mutations within the defined region, similar probes can be designed by the skilled practitioner and used for hybridisation to a target nucleic acid sequence. The design and optimisation of probes and hybridisation conditions lies within the capabilities of the skilled practitioner.

[0149] In the scope of the present invention the term “hybridisation” signifies hybridisation under conventional hybridising conditions, preferably under stringent conditions, as described for example in Sambrook et al., Molecular Cloning, A Laboratory Manual, 2nd Edition (1989) Cold Spring Harbor Laboratory Press, Cold Spring Harbor, N.Y.). The term “stringent” when used in conjunction with hybridisation conditions is as defined in the art, i.e. 15-20° C. under the melting point Tₘ, cf. Sambrook et al, 1989, pages 11.45-11.49. Preferably, the conditions are “highly stringent”, i.e. 5-10° C. under the melting point Tₘ. Under highly stringent conditions hybridisation only occurs if the identity between the oligonucleotide sequence and the locus of interest is 100%, while no hybridisation occurs if there is just one mismatch between oligonucleotide and DNA locus. Such optimised hybridisation results are reached by adjusting the temperature and/or the ionic strength of the hybridisation buffer as described in the art. However equally high specificity may be obtained using high-affinity DNA analogues. One such high-affinity DNA analogues has been termed “locked nucleic acid” (LNA). LNA is a novel class of bicyclic nucleic acid analogues in which the furanose ring conformation is restricted in by a methylene linker that connects the 2′-O position to the 4′-C position. Common to all of these LNA variants is an affinity toward complementary nucleic acids, which is by far the highest reported for a DNA analogue (Ørum et al. (1999) Clinical Chemistry 45, 1898-1905; WO 99/14226 EXIQON). LNA probes are commercially available from Proligo LLC, Boulder, Colo., USA. Another high-affinity DNA analogue is the so-called protein nucleic acid (PNA). In PNA compounds, the sugar backbone of an oligonucleotide is replaced with an amide containing backbone, in particular an aminoethylglycine backbone. The nucleobases are retained and are bound directly or indirectly to aza nitrogen atoms of the amide portion of the backbone (Science (1991) 254: 1497-1500).

[0150] Various different labels can be coupled to the probe. Among these fluorescent reporter groups are preferred because they result in a high signal/noise ratio.

[0151] Suitable examples of the fluorescent group include fluorescein, Cy2, Cy3, Cy3.5, Cy5, Cy5.5, Cy7, acridin, Hoechst 33258, Rhodamine, Rhodamine Green, Tetramethylrhodamine, Texas Red, Cascade Blue, Oregon Green, Alexa Fluor, europium and samarium.

[0152] Another type of labels are enzyme tags. After hybridisation to the target nucleic acid sequence a substrate for the enzyme is added and the formation of a coloured product is measured. Examples of enzyme tags include a beta-Galactosidase, a peroxidase, horseradish peroxidase, a urease, a glycosidase, alkaline phosphatase, chloramphenicol acetyltransferase and a luciferase.

[0153] A further group of labels include chemiluminescent group, such as hydrazides such as luminol and oxalate esters.

[0154] A still further possibility is to use a radioisotope and detect the hybrid using scintillation counting. The radioisotope may be selected from the group consisting of ³²P, ³³P, ³⁵S, ¹²⁵I, ⁴⁵Ca, ¹⁴C and ³H.

[0155] One particularly preferred embodiment of the probe based detection comprises the use of a capture probe for capturing a target nucleic acid sequence. The capture probe is bound to a solid surface such as a bead, a well or a stick. The captured target nucleic acid sequence can then be contacted with the detection probe under conditions of high stringency and the allele be detected.

[0156] One embodiment of the probe based technique based on TAQMAN technique. This is a method for measuring PCR product accumulation using a dual-labeled fluorogenic oligonucleotide probe called a TAQMAN® probe. This probe is composed of a short (ca. 20-25 bases) oligodeoxynucleotide that is labeled with two different flourescent dyes. On the 5′ terminus is a reporter dye and on the 3′ terminus is a quenching dye. This oligonucleotide probe sequence is homologous to an internal target sequence present in the PCR amplicon. When the probe is intact, energy transfer occurs between the two flourophors and emission from the reporter is quenched by the quencher. During the extension phase of PCR, the probe is cleaved by 5′ nuclease activity of Taq polymerase thereby releasing the reporter from the oligonucleotide-quencher and producing an increase in reporter emission intensity.

[0157] Other suitable methods include using mass spectrometry, single base extension, determining the Tm profile of a hybrid between a probe and a target nucleic acid sequence, using single strand conformation polymorphism, using single strand conformation polymorphism heteroduplex, using RFLP or RAPD, using HPLC, using sequencing of a target nucleic acid sequence from said biological sample.

[0158] Denaturing high-performance liquid chromatography (DHPLC) has been proven useful in human and animal genetic studies for detecting single nucleotide polymorphisms (SNPs). In contrary to most SNP detection methods that are currently in used, SNP detection by DHPLC is not based on a re-sequencing strategy that is expensive to implement, nor does it require gel-based genotyping procedures. Instead, SNP detection by DHPLC is based on resolving heteroduplex from homoduplex DNA fragments produced by PCR amplification using temperature-modulated heteroduplex analysis.

[0159] In connection with several of these methods there is a need for amplifying the amount of target nucleic acid in the biological sample isolated from the subject. Amplification may be performed by any known method including methods selected from the group consisting of polymerase chain reaction (PCR), Ligase Chain Reaction (LCR), Nucleic Acid Sequence-Based Amplification (NASBA), strand displacement amplification, rolling circle amplification, and T7-polymerase amplification.

[0160] More particularly, PCR-based amplification can be carried out using for example a primer pair comprising appropriate sequences selected from the sequences identified in Table 5 below.

TABLE 5

| | | | |
|---|---|---|---|
| | | | SEQ ID |
| Gene | SNP Rs ID No. | Primer | NO |

| | | | | |
|---|---|---|---|---|
| NHP2L1 | rs8779 | F | AGC AGC ATA CCA AAG AGA TG | 15 |
| | | R | ACA CAT GAA CTA GCA CTC TC | 16 |
| | | snp | AAT GCT GCA GGA CTC CGG AGG C | 17 |
| | rs132806 | F | TTC AAC GGT GCC ACC ACC | 18 |
| | | R | ATC CAT TCA GCA GTC CAT TG | 19 |
| | | snp | AAC TGA CTA AAC TAG GTG CCA CGT CGT | 20 |
| | | | GAA ACC TGT AAA ACA GAA CAA AAA | |
| | rs11561 | F | TGT AGG GCT TGA GAA AAT GC | 21 |
| | | R | CAG GTG CAG AAT GAT CTC C | 22 |
| | | snp | AAC TGA CTA AAC TAG GTG CCA CGC CCC | 23 |
| | | | TGT TGA GGG TTT TGG | |
| | rs5758405 | F | TTA CAT GAC TGC TGA ACG AG | 24 |
| | | R | GTC CAT TGT TAA CTA CCT GG | 25 |
| | | snp | CTC AGT CTA TGG GGG GGA | 26 |
| PIPPIN | rs6002408 | F | CGA ACC ATA TTC TAG ACC ATC | 27 |
| | | R | TCG ACT CTG AAG TCA TGG TG | 28 |
| | | snp | GAG CCC GTG GCT GGT GAG GC | 29 |
| | rs1006407 | F | CCA AGA TGT GTG TGC ACC C | 30 |
| | | R | CGG CCC CAC TTC TCC CC | 31 |
| | | snp | CCA GGA AGG AGG GCC CTG TC | 32 |
| EP300 | Rs20551 | F | ATC CTC CAT CTA CTA GTA GC | 33 |
| | | R | GAA GTA CTT GGC TGG TCT TC | 34 |
| | | snp | AAC TGA CTA AAC TAG GTG CCA CGT | 35 |
| | | | CGT GAA CAG ATA CGC AGC CGG AGG AT | |
| | Rs2294976 | F | ATG GTT ACT ATT GGT GAT TCC | 36 |
| | | R | TCG GTA TGG AAA GGA TTC TG | 37 |
| | | snp | AAC TGA CTA AAC TAG GTG CCA CGT | 38 |
| | | | CGT GAA AGT CTG ACA AGT TAT GTT GTG | |
| | | | GTT CCC CCA | |
| | Rs2076578 | F | GGA GAT ATT CTG TGC TAT TCC | 39 |
| | | R | TGC TGT CTC GCT TGG TCA C | 40 |
| | | snp | ACT GAC TAA ACT AGG TGC AAA CCT TAT | 41 |
| | | | TTT CTT GTC TC | |
| | Rs1046088 | F | CAA CCA TAA CCA GTT CCA GC | 42 |
| | | R | CAT ATT TCC TTG TTG CAT CTG | 43 |
| | | snp | AAC TGA CTA AAC TAG AGT TGG CTA CCC | 44 |
| | | | ACC ACA GC | |
| PACSIN2 | rs2068943 | F | CAG CAG TCA GTG GGA CAG | 45 |
| | | R | TCT TAG GAG ACA GTC GTG C | 46 |
| | | snp | AAC TGA CTA AAC TAG GTG CCA CGT | 47 |
| | | | CGT GAA AGT CTG ACT TGC ACA GGA | |
| | | | TAA TCT TAC A | |
| | rs2267487 | F | TGA GTA GAG AGG CGG CTC | 48 |
| | | R | GAT TAC CTT CCC TGA ACT TC | 49 |
| | | snp | AAC TGA CTA AAC TAG GTG GCG AGC | 50 |
| | | | GGC TTT GGG AGA GT | |
| BRD1 | rs138881 | F | ATC CGC CGA TTC CAC TAA C | 51 |
| | | R | ACG AGT GAC ACG ATT GAG G | 52 |
| | | snp | AAG GAG TTC TGA GAA TCC GTA G | 53 |
| | rs138880 | F | TAC CTG GTC CTA TCG GAT G | 54 |
| | | R | TTT CCA TGG TGG TCA CTG C | 55 |
| | | snp | AAC TGA CAC AGG CCC TCC ACA CGC | 56 |
| | | | ACA | |
| | rs4468 | F | TCT TTC GAC AAA GTA CCA TTC | 57 |
| | | R | TCC AAG TTT TCT AGG AAC CC | 58 |
| | | snp | AAC TGA CTA AAC TAG GTG CGT GAC | 59 |
| | | | GCC AGC AGC ACG GCC | |
| | rs138855 | F | GAG GTA CAT GCG TGT AGT C | 60 |
| | | R | GCT GAC ACA GAT GTG GTT G | 61 |
| | | snp | AAC TGA CTA AAC TAG GGC ACT CCA | 62 |
| | | | GCC TGG GTG ACA | |
| | rs2239848 | F | ACA CGG TCG GCA GGA CC | 63 |
| | | R | AAA GAC CGC TTA CTG TGA TG | 64 |
| | | snp | AAC TGA CAG ACG CCA TTT TTC ATT TC | 65 |
| SERHL | rs1060387 | F | AAC AGG ACA TGG GCC TGC | 66 |
| | | R | CCT TGT GAC GAG AAT TCA CC | 67 |
| | | snp | AAC TGA CTA AAC TAG GTG CCA CGT | 68 |
| | | | CGT GAA AAC AGC ATT GAC TTC GTC AG | |
| | rs881542 | F | TTT AGC CAT TTT GAC CAG GC | 69 |
| | | R | CTG GTC TCG AAC TCT CAA C | 70 |
| | | snp | AAC TGA CTA AAC TAG GTG CCA CGT | 71 |
| | | | CGT GAA AGT CTG ACA ATC CCA GCA | |
| | | | TTT TGG GAG G | |
| | rs881542 | F | TGT GTC TTT CAG GTC TGA TC | 72 |
| | | R | GAA GAG GGA TGA GTC TGT C | 73 |
| | | snp | AAC TGA CTA AAC TAG GTG CCA CGT | 74 |
| | | | CGT CGG CTG GCT GGA CAA TGC CA | |
| GPR24 | rs133068 | F | AAG CAT GGT TCC TCA CTT CC | 75 |
| | | R | AGA TCC CTA CAT GTG TCC TC | 76 |
| | | snp | AAC TGA CTA AAG AGG GGT TTT CTG | 77 |
| | | | TCT CCC C | |
| | rs133069 | F | AAG CAT GGT TCC TCA CTT CC | 78 |
| | | R | AGA TCC CTA CAT GTG TCC TC | 79 |
| | | | ATC CCC CAC CCC ACC CCC | 80 |
| | rs133070 | F | CCT GAG TCT GGC AGT GGG | 81 |
| | | R | CAC CCT CGG CCC CTT CC | 82 |
| | | snp | AAC TGA CTA AAC TAG TCA GAT ATT | 83 |
| | | | TGT CTC AAA GA | |
| | rs133073 | F | GGA GCT CAG CTC GGT TGT G | 84 |
| | | R | GCT CTG CTC CTG CCC GTC | 85 |
| | | snp | AAC TGA CTA AAC TAG GTG CCA CGT | 86 |
| | | | CGT CTG CTG CCC ACT GGT CCC AA | |

F - forward PCR primer
R - reverse PCR primer
snp - primers for the single base extension detection method

[0161] One of the primers may comprise a moiety for subsequent immobilisation of the amplified fragments.

[0162] It is understood that the primers identified above may also be used as probes for determining the polymorphisms of the invention in a nucleic acid sequence using any of the methods known in the art and featured above.

[0163] To the extent that the polymorphisms as defined in the present invention are present in DNA sequences transcribed as mRNA transcripts these transcripts constitute a suitable target sequence for detection of the polymorphisms. Commercial protocols are available for isolation of total mRNA. Through the use of suitable primers the target mRNA can be amplified and the presence or absence of polymorphisms be detected with any of the techniques described above for detection of polymorphisms in a DNA sequence.

### 2. Proteins

[0164] As discussed above, genetic polymorphism of the invention can also be detected as a polymorphism of a protein product of the gene, or a change in a biological response mediated by the protein.

[0165] The polymorphism located for example in the NHP2L1, SERHL or EP300 genes may also be detected by isolating the protein from a biological sample and determining the presence or absence of the mutated residue (according to Table 3 above) by sequencing said protein, or determining the presence or absence of another polymorphic amino acid located in a mutant gene. The polymorphism of any of the variant proteins of the invention may be detected likewise.

[0166] Isolated/identified variant proteins expressed by any of the other polymorphic genes of the invention are used as alternative diagnostic markers of the genetic polymorphism associated with a predisposition to a mental disease of the invention.

[0167] The invention also concerns using variant proteins described herein, or fragments or variants thereof, said fragments and variants comprising a polymorphism corresponding to the polymorphism of the variant protein, for the manufacture of an antibody, which may be used both in methods for diagnosis and methods of treatment of SCH and/or BPD.

### Isolated Oligonucleotides

[0168] In one aspect the invention relates to an isolated oligonucleotide comprising at least 10 contiguous nucleotides being 100% identical to a subsequence of the genes of the invention comprising or adjacent to a polymorphism or mutation being correlated to an mental disease, or being 100% identical to a subsequence of the human genome which is in linkage disequilibrium with any of the genes of the invention comprising or adjacent to a polymorphism or mutation being correlated to a mental disease. As explained in the summary, such probes may be used for detecting the presence of a polymorphism of interest and/or they may constitute part of a primer pair and/or they may form part of a gene therapy vector used for treating the mental diseases.

[0169] Preferably the isolated oligonucleotide comprises at least 10 contiguous bases of a sequence identified as SEQ ID NOs: 8-14 or the corresponding complementary strand, or a strand sharing at least 90% sequence identity more preferably at least 95% sequence identity with SEQ ID NOs: 8-14 or a complementary strand thereof, said isolated oligonucleotide comprising a polymorphism of the invention.

[0170] Further preferred isolated oligonucleotide may comprise at least 10 contiguous bases of any of the sequences identified as SEQ ID NOS: 1-7 and 94 or the corresponding complementary strand thereof, or a strand sharing at least 90% sequence identity more preferably at least 95% sequence identity with any of the SEQ ID NOS: 1-7 and 94 or a complementary strand thereof, said isolated oligonucleotide comprising a polymorphism of the invention.

[0171] These particular oligonucleotides may be used as probes for assessing the polymorphisms in the human BRD1, NHP2L1, PACSIN2, SERHL, PIPPIN, EP300, FAM19A5 and GPR24 genes which are strongly correlated with mental diseases of the invention, such as SCH and/or BPD.

[0172] The length of the isolated oligonucleotide depends on the purpose. When being used for amplification from a sample of genomic DNA, the length of the primers should be at least 15 and more preferably even longer to ensure specific amplification of the desired target nucleotide sequence. When being used for amplification from mRNA the length of the primers can be shorter while still ensuring specific amplification. In one particular embodiment one of the pair of primers may be an allele specific primer in which case amplification only occurs if the specific allele is present in the sample. When the isolated oligonucleotides are used as hybridisation probes for detection, the length is preferably in the range of 10-15 nucleotides. This is enough to ensure specific hybridisation in a sample with an amplified target nucleic acid sequence. When using nucleotides which bind stronger than DNA (e.g. LNA and/or PNA), the length of the probe can be somewhat shorter, e.g. down to 7-8 bases.

[0173] The length may be at least 15 contiguous nucleotides, such as at least 20 nucleotides. An upper limit preferably determines the maximum length of the isolated oligonucleotide. Accordingly, the isolated oligonucleotide may be less than 1000 nucleotides, more preferably less than 500 nucleotides, more preferably less than 100 nucleotides, such as less than 75 nucleotides, for example less than 50 nucleotides, such as less than 40 nucleotides, for example less than 30 nucleotides, such as less than 20 nucleotides.

[0174] The isolated oligonucleotide may comprise from 10 to 50 nucleotides, such as from 10 to 15, from 15 to 20, from 20 to 25, or comprising from 20 to 30 nucleotides, or from 15 to 25 nucleotides.

[0175] Depending on the use the polymorphism may be located in the centre of the nucleic acid sequence, in the 5′ end of the nucleic acid sequence, or in the 3′ end of the nucleic acid sequence.

[0176] For detection based on single base extension the sequence of the oligonucleotide is adjacent to the mutation/polymorphism, either in the 3′ or 5′ direction.

[0177] The isolated oligonucleotide sequence may be complementary to a sub-sequence of the coding strand of a target nucleotide sequence or to a sub-sequence to the non-coding strand of a target nucleotide sequence as the polymorphism may be assessed with similar efficiency in the coding and the non-coding strand.

[0178] The isolated oligonucleotide sequence may be made from RNA, DNA, LNA, PNA monomers or from chemically modified nucleotides capable of hybridising to a target nucleic acid sequence. The oligonucleotides may also be made from mixtures of said monomers.

### Antibody

[0179] Antibodies directed against unimpaired (wild type) or mutant polypeptide products of the BRD1, NHP2L1, PACSIN2, SERHL, PIPPIN, EP300, FAM19A5 and/or GPR24 genes or conserved variants or peptide fragments thereof, which are discussed, above, may also be used as compounds in the methods for diagnosis/prognosis of a BRD1, NHP2L1, PACSIN2, SERHL, PIPPIN, EP300, FAM19A5 and/or GPR24 gene associated disorder or a neuropsychiatric disorder, in particular such as SCH and BPD.

[0180] Such methods may be used to detect abnormalities in the level of the BRD1, NHP2L1, PACSIN2, SERHL, PIPPIN, EP300, FAM19A5 and/or GPR24 gene encoded polypeptide synthesis or expression, or abnormalities in the structure, temporal expression, and/or physical location of BRD1, NHP2L1, PACSIN2, SERHL, PIPPIN, EP300, FAM19A5 and GPR24 proteins. The antibodies and immunoassay methods described below have, for example, important in vitro applications in assessing the efficacy of treatments for the BRD1, NHP2L1, PACSIN2, SERHL, PIPPIN, EP300, FAM19A5 and GPR24 gene associated disorders, such as neuropsychiatric disorders, for example SCH and/or BDP. Antibodies, or fragments of antibodies, such as those described below, may be used to screen potentially therapeutic compounds in vitro to determine their effects on BRD1, NHP2L1, PACSIN2, SERHL, PIPPIN, EP300, FAM19A5 and/or GPR24 gene expression and BRD1, NHP2L1, PACSIN2, SERHL, PIPPIN, EP300, FAM19A5 and/or GPR24 protein production. The compounds that have beneficial effects on a BRD1, NHP2L1, PACSIN2, SERHL, PIPPIN, EP300, FAM19A5 and/or GPR24 gene disorder, such as SCH and BPD, can be identified, and a therapeutically effective dose determined.

[0181] In vitro immunoassays may also be used, for example, to assess the efficacy of cell-based gene therapy for a BRD1, NHP2L1, PACSIN2, SERHL, PIPPIN, EP300, FAM19A5 and/or GPR24 gene associated disorder, such as SCH and/or BPD. Antibodies directed against BRD1, NHP2L1, PACSIN2, SERHL, PIPPIN, EP300, FAM19A5 and/or GPR24 polypeptides may be used in vitro to determine, for example, the level of BRD1, NHP2L1, PACSIN2, SERHL, PIPPIN, EP300, FAM19A5 and/or GPR24 gene expression achieved in cells genetically engineered to produce BRD1, NHP2L1, PACSIN2, SERHL, PIPPIN, EP300, FAM19A5 and/or GPR24 polypeptides. In the case of intracellular BRD1, NHP2L1, PACSIN2, SERHL, PIPPIN, EP300, FAM19A5 and/or GPR24 gene products, including both transcriptional and translational products, such an assessment is done, preferably, using cell lysates or extracts. Such analysis will allow for a determination of the number of transformed cells necessary to achieve therapeutic efficacy in vivo, as well as optimization of the gene replacement protocol.

[0182] For the purpose of below discussion all molecules that produced due to activity of the BRD1, NHP2L1, PACSIN2, SERHL, PIPPIN, EP300, FAM19A5 and/or GPR24 genes, such as transcriptional and translational products of the genes, are termed herein “gene products”, if not specified otherwise.

[0183] The tissue or cell type to be analyzed will generally include those that are known, or suspected, to express the BRD1, NHP2L1, PACSIN2, SERHL, PIPPIN, EP300, FAM19A5 and/or GPR24 genes. The protein isolation methods employed herein may, for example, be such as those described in Harlow and Lane (1988, “Antibodies: A Laboratory Manual”, Cold Spring Harbor Laboratory Press, Cold Spring Harbor, N.Y.). The isolated cells can be derived from cell culture or from a patient. The analysis of cells taken from culture may be a necessary step in the assessment of cells to be used as part of a cell-based gene therapy technique or, alternatively, to test the effect of compounds on expression of the BRD1, NHP2L1, PACSIN2, SERHL, PIPPIN, EP300, FAM19A5 and/or GPR24 genes.

[0184] Preferred diagnostic methods for the detection of BRD1, NHP2L1, PACSIN2, SERHL, PIPPIN, EP300, FAM19A5 and/or GPR24 gene products, such as BRD1, NHP2L1, PACSIN2, SERHL, PIPPIN, EP300, FAM19A5 and/or GPR24 proteins or conserved variants or peptide fragments thereof, may involve, for example, immunoassays wherein these products are detected by their interaction with an anti-BRD1, NHP2L1, PACSIN2, SERHL, PIPPIN, EP300, FAM19A5 and/or GPR24-specific antibody.

[0185] For example, antibodies, or fragments of antibodies, useful in the present invention may be used to quantitatively or qualitatively detect the presence of BRD1, NHP2L1, PACSIN2, SERHL, PIPPIN, EP300, FAM19A5 and/or GPR24 proteins or conserved variants or peptide fragments thereof. This can be accomplished, for example, by immunofluorescence techniques employing a fluorescently labeled antibody coupled with light microscopic, flow cytometric, or fluorimetric detection. Such techniques are especially preferred for the proteins that are expressed on the cell surface.

[0186] The antibodies, or fragments thereof, useful in the present invention may, additionally, be employed histologically, as in immunofluorescence or immunoelectron microscopy, for in situ detection of the BRD1, NHP2L1, PACSIN2, SERHL, PIPPIN, EP300, FAM19A5 and/or GPR24 gene derived polypeptide products or conserved variants or peptide fragments thereof. In situ detection may be accomplished by removing a histological specimen from a patient, and applying thereto a labelled antibody of the present invention. The antibody (or fragment) is preferably applied by overlaying the labeled antibody (or fragment) onto a biological sample. Through the use of such a procedure, it is possible to determine not only the presence of BRD1, NHP2L1, PACSIN2, SERHL, PIPPIN, EP300, FAM19A5 and/or GPR24 protein or conserved variants or peptide fragments, but also its distribution in the examined tissue. Using the present invention, those of ordinary skill will readily perceive that any of a wide variety of histological methods (such as staining procedures) can be modified in order to achieve such in situ detection.

[0187] Immunoassays for BRD1, NHP2L1, PACSIN2, SERHL, PIPPIN, EP300, FAM19A5 and/or GPR24 proteins or conserved variants or peptide fragments thereof will typically comprise incubating a sample, such as a biological fluid, a tissue extract, freshly harvested cells, or lysates of cells, that have been incubated in cell culture, in the presence of a detectably labeled antibody capable of identifying BRD1, NHP2L1, PACSIN2, SERHL, PIPPIN, EP300, FAM19A5 and/or GPR24 proteins or conserved variants or peptide fragments thereof, and detecting the bound antibody by any of a number of techniques well-known in the art.

[0188] The biological sample may be brought in contact with and immobilized onto a solid phase support or carrier such as nitrocellulose, or other solid support that is capable of immobilizing cells, cell particles or soluble proteins. The support may then be washed with suitable buffers followed by treatment with the detectably labeled BRD1, NHP2L1, PACSIN2, SERHL, PIPPIN, EP300, FAM19A5 and/or GPR24 protein specific antibody. The solid phase support may then be washed with the buffer a second time to remove unbound antibody. The amount of bound label on solid support may then be detected by conventional means.

[0189] By “solid phase support or carrier” is intended any support capable of binding an antigen or an antibody. Well-known supports or carriers include glass, polystyrene, polypropylene, polyethylene, dextran, nylon, amylases, natural and modified celluloses, polyacrylamides, gabbros, and magnetite. The nature of the carrier can be either soluble to some extent or insoluble for the purposes of the present invention. The support material may have virtually any possible structural configuration so long as the coupled molecule is capable of binding to an antigen or antibody. Thus, the support configuration may be spherical, as in a bead, or cylindrical, as in the inside surface of a test tube, or the external surface of a rod. Alternatively, the surface may be flat such as a sheet, test strip, etc. Preferred supports include polystyrene beads. Those skilled in the art will know many other suitable carriers for binding antibody or antigen, or will be able to ascertain the same by use of routine experimentation.

[0190] The binding activity of an anti-BRD1, NHP2L1, PACSIN2, SERHL, PIPPIN, EP300, FAM19A5 and/or GPR24 antibody may be determined according to well known methods. Those skilled in the art will be able to determine operative and optimal assay conditions for each determination by employing routine experimentation.

[0191] One of the ways in which an BRD1, NHP2L1, PACSIN2, SERHL, PIPPIN, EP300, FAM19A5 and/or GPR24-specific antibody can be detectably labeled is by linking the same to an enzyme and use in an enzyme immunoassay (EIA) (Voller, A., “The Enzyme Linked Immunosorbent Assay (ELISA)”, 1978, Diagnostic Horizons 2, 1-7 and 94, Microbiological Associates Quarterly Publication, Walkersville, Md.); Voller, A. et al., 1978, J. Clin. Pathol. 31, 507-520; Butler, J. E., 1981, Meth. Enzymol. 73, 482-523; Maggio, E. (ed.), 1980, Enzyme Immunoassay, CRC Press, Boca Raton, Fla.; Ishikawa, E. et al., (eds.), 1981, Enzyme Immunoassay, Kgaku Shoin, Tokyo). The enzyme which is bound to the antibody will react with an appropriate substrate, preferably a chromogenic substrate, in such a manner as to produce a chemical moiety that can be detected, for example, by spectrophotometric, fluorimetric or by visual means. Enzymes that can be used to detectably label the antibody include, but are not limited to, malate dehydrogenase, staphylococcal nuclease, delta-5-steroid isomerase, yeast alcohol dehydrogenase, .alpha.-glycerophosphate, dehydrogenase, triose phosphate isomerase, horseradish peroxidase, alkaline phosphatase, asparaginase, glucose oxidase, .beta.-galactosidase, ribonuclease, urease, catalase, glucose-6-phosphate dehydrogenase, glucoamylase and acetylcholinesterase. The detection can be accomplished by colorimetric methods that employ a chromogenic substrate for the enzyme. Detection may also be accomplished by visual comparison of the extent of enzymatic reaction of a substrate in comparison with similarly prepared standards.

[0192] Detection may also be accomplished using any of a variety of other immunoassays. For example, by radioactively labelling the antibodies or antibody fragments, it is possible to detect the BRD1, NHP2L1, PACSIN2, SERHL, PIPPIN, EP300, FAM19A5 and/or GPR24 polypeptides through the use of a radioimmunoassay (RIA) (see, for example, Weintraub, B., Principles of Radioimmunoassays, Seventh Training Course on Radioligand Assay Techniques, The Endocrine Society, March, 1986). The radioactive isotope can be detected by such means as the use of a gamma counter or a scintillation counter or by autoradiography.

[0193] It is also possible to label the antibody with a fluorescent compound. When the fluorescently labeled antibody is exposed to light of the proper wave length, its presence can then be detected due to fluorescence. Among the most commonly used fluorescent labeling compounds are fluorescein isothiocyanate, rhodamine, phycoerythrin, phycocyanin, allophycocyanin, o-phthaldehyde and fluorescamine.

[0194] The antibody can also be detectably labeled using fluorescence emitting metals such as .sup.152 Eu, or others of the lanthanide series. These metals can be attached to the antibody using such metal chelating groups as diethylenetriaminepentacetic acid (DTPA) or ethylenediaminetetraacetic acid (EDTA).

[0195] The antibody also can be detectably labeled by coupling it to a chemiluminescent compound. The presence of the chemiluminescent-tagged antibody is then determined by detecting the presence of luminescence that arises during the course of a chemical reaction. Examples of particularly useful chemiluminescent labeling compounds are luminol, isoluminol, theromatic acridinium ester, imidazole, acridinium salt and oxalate ester.

[0196] Likewise, a bioluminescent compound may be used to label the antibody of the present invention. Bioluminescence is a type of chemiluminescence found in biological systems in which a catalytic protein increases the efficiency of the chemiluminescent reaction. The presence of a bioluminescent protein is determined by detecting the presence of luminescence. Important bioluminescent compounds for purposes of labeling are luciferin, luciferase, green fluorescent protein and aequorin.

### Biological Sample

[0197] The biological sample used in the present invention may be any suitable biological sample comprising genetic material and/or proteins. In a preferred embodiment the sample is a blood sample, a tissue sample, a secretion sample, semen, ovum, hairs, nails, tears, and urine. The most convenient sample type is a blood sample.

### Kits

[0198] In one aspect there is provided a kit for predicting the risk of a subject for developing mental diseases, such as SCH and/or BPD or for other diagnostic and classification purposes of mental diseases such as SCH and/or BPD comprising at least one probe comprising a nucleic acid sequence as defined in the previous section.

[0199] In one embodiment the probe is linked to a detectable label.

[0200] In another embodiment based on single nucleotide extension the kit further comprises at least one nucleotide monomer labelled with a detectable label, a polymerase and suitable buffers and reagents.

[0201] The kit preferably also comprises set of primers for amplifying a region comprising at least one of the identified above polymorphisms in any of the genes selected from the BRD1, NHP2L1, PACSIN2, SERHL, PIPPIN, EP300, FAM19A5 and GPR24 genes or transcriptional products of said genes, or the corresponding complementary strands. The primers preferably are at least 15 bases long and may be coupled to an entity suitable for subsequent immobilisation.

[0202] In another embodiment a diagnostic kit of the invention may comprise an antibody as described above.

### Diseases

[0203] According to the invention the association of an SNP with a particular disease means the association a particular allele at the position of said SNP with a predisposition to said disease or with a protection against said disease. Non-limited examples of the protective/susceptibility alleles of the SNP having the positions as of Table 1 are given in Table 6 below.

TABLE 6

Allele

| | SEQ ID | | | pro- | suscep- |
|---|---|---|---|---|---|
| Gene | NO | SNP | SNP ID | tective | tibility |
| NHP2L1 | 1 | A/G | rs11561 | A | G in SCH |
| PACSIN2 | 2 | C/T | rs2068943 | T | C in SCH |
| SERHL | 3 | C/G | rs881542 | G | C in SCH |
| | 3 | A/G | rs926333 | G | A in SCH |
| BRD1 | 5 | T/C | rs4468 | T | C in SCH |
| | 5 | A/C | rs138880 | A | C in SCH |
| EP300 | 6 | A/G | rs20551 | G | A in BPD |
| | 6 | A/C | rs1046088 | C | A in BPD |

[0204] According to the invention individuals carrying the protective alleles at positions identified herein are less likely to develop a mental disease of the invention. In contrary, the presence of the susceptibility allele is indicative of a predisposition to a mental disease of the invention.

[0205] Thus, in one embodiment the invention relates to a method for determining a predisposition of an individual to a mental disease, in particular SCH and/BDP, said method comprising determining the presence in a biological sample from said individual the susceptibility allele of at least one SNP selected from the SNPs identified above as rs11561, rs5758405 rs8779, rs132806, rs2068943, rs2267487, rs881542, rs926333, rs1060387, rs1006407, rs4468, rs138855, rs2239848, rs138880, rs138881, rs20551, rs2294976, rs2076578, rs1046088, rs133068, rs133069, rs133070, rs133073, rs6002408.

[0206] In another embodiment the invention relates to a method for determining a predisposition of an individual to a mental disease, in particular SCH and/BDP, said method comprising determining the presence in a biological sample from said individual the susceptibility allele of two or more of the SNPs identified above as rs11561, rs5758405 rs8779, rs132806, rs2068943, rs2267487, rs881542, rs926333, rs1060387, rs1006407, rs4468, rs138855, rs2239848, rs138880, rs138881, rs20551, rs2294976, rs2076578, rs1046088, rs133068, rs133069, rs133070, rs133073, rs6002408.

[0207] In still another embodiment, the invention relates to a method for determining a predisposition of an individual to a mental disease, in particular SCH and/BDP, said method comprising determining the presence in a biological sample from said individual the susceptibility allele of one or more SNPs of the identified above as rs11561, rs5758405 rs8779, rs132806, rs2068943, rs2267487, rs881542, rs926333, rs1060387, rs1006407, rs4468, rs138855, rs2239848, rs138880, rs138881, rs20551, rs2294976, rs2076578, rs1046088, rs133068, rs133069, rs133070, rs133073, rs6002408 and the presence at least one of the SNPs of the identified above as rs909660, rs710193, rs1573745, rs132234, rs3752466, rs6010260, rs137931, rs137932, rs3810971, rs2272843, rs1063900, rs715519, rs916005.

[0208] In yet another embodiment, the invention relates to a method for determining a predisposition of an individual to a mental disease, in particular SCH and/BDP, said method comprising determining the presence in a biological sample from said individual one or more SNPs selected from the SNPs identified above rs909660, rs710193, rs1573745, rs132234, rs3752466, rs6010260, rs137931, rs137932, rs3810971, rs2272843, rs1063900, rs715519, rs916005.

[0209] In yet another embodiment, the invention relates to a method for determining a predisposition of an individual to not having a mental disease, in particular SCH and/BDP, said method comprising determining the presence in a biological sample from said individual the protective allele of one or more SNPs selected from the SNPs identified above as rs11561, rs5758405 rs8779, rs132806, rs2068943, rs2267487, rs881542, rs926333, rs1060387, rs1006407, rs4468, rs138855, rs2239848, rs138880, rs138881, rs20551, rs2294976, rs2076578, rs1046088, rs133068, rs133069, rs133070, rs133073, rs6002408.

[0210] In some embodiments the method for determining a predisposition/no predisposition to a mental disease of the invention, in particular SCH and/or BDP, may concern determining two or more of the above described SNPs

Screening for New Candidate Drugs for Therapeutic Treatment SCH and/or BPD

[0211] Screening methods for compounds with are capable of modulating the BRD1, NHP2L1, PACSIN2, SERHL, PIPPIN, EP300, FAM19A5 and/or GPR24 protein-protein interactions are within the scope of the invention.

[0212] For the purpose of below discussion molecules that produced in the cells due to activity of the BRD1, NHP2L1, PACSIN2, SERHL, PIPPIN, EP300, FAM19A5 and/or GPR24 genes, such as transcriptional and translational products of the genes, are termed herein “gene products”, if not specified otherwise.

[0213] Any method suitable for detecting protein-protein interactions may be employed for identifying the BRD1, NHP2L1, PACSIN2, SERHL, PIPPIN, EP300, FAM19A5 and/or GPR24 protein-protein interactions.

[0214] Among the traditional methods that may be employed are co-immunoprecipitation, cross-linking and co-purification through gradients or chromatographic columns. Utilizing procedures such as these allows for the identification of proteins, including intracellular proteins, which interact with BRD1, NHP2L1, PACSIN2, SERHL, PIPPIN, EP300, FAM19A5 and/or GPR24 proteins. Once isolated, such a protein can be identified and can be used in conjunction with standard techniques, to identify proteins it interacts with. For example, at least a portion of the amino acid sequence of a protein that interacts with BRD1, NHP2L1, PACSIN2, SERHL, PIPPIN, EP300, FAM19A5 and/or GPR24 protein can be ascertained using techniques well known to those of skill in the art, such as via the Edman degradation technique (see, e.g., Creighton, 1983, “Proteins: Structures and Molecular Principles,” W.H. Freeman & Co., N.Y., pp. 34-49). The amino acid sequence obtained may be used as a guide for the generation of oligonucleotide mixtures that can be used to screen for gene sequences encoding such proteins. Screening made be accomplished, for example, by standard hybridization or PCR techniques. Techniques for the generation of oligonucleotide mixtures and the screening are well-known. (See, e.g., Ausubel, supra, and 1990, “PCR Protocols: A Guide to Methods and Applications,” Innis, et al., eds. Academic Press, Inc., New York).

[0215] Additionally, methods may be employed that result in the simultaneous identification of genes that encode a protein which interacts with BRD1, NHP2L1, PACSIN2, SERHL, PIPPIN, EP300, FAM19A5 and/or GPR24 protein. These methods include, for example, probing expression libraries with labelled BRD1, NHP2L1, PACSIN2, SERHL, PIPPIN, EP300, FAM19A5 and/or GPR24 polypeptides, using BRD1, NHP2L1, PACSIN2, SERHL, PIPPIN, EP300, FAM19A5 and/or GPR24 proteins in a manner similar to the well known technique of antibody probing of lambda.gtll and lambda.gt10 libraries.

[0216] One method that detects protein interactions in vivo, the two-hybrid system, is described in detail for illustration only and not by way of limitation. One version of this system has been described (Chien, et al., 1991, Proc. Natl. Acad. Sci. USA, 88, 9578-9582) and is commercially available from Clontech (Palo Alto, Calif.).

[0217] Briefly, utilizing such a system, plasmids are constructed that encode two hybrid proteins: one consists of the DNA-binding domain of a transcription activator protein fused to the BRD1, NHP2L1, PACSIN2, SERHL, PIPPIN, EP300, FAM19A5 and/or GPR24 gene peptide product and the other consists of the transcription activator protein's activation domain fused to an unknown protein that is encoded by a cDNA that has been recombined into this plasmid as part of a cDNA library. The DNA-binding domain fusion plasmid and the cDNA library are transformed into a strain of the yeast Saccharomyces cerevisiae that contains a reporter gene (e.g., HBS or lacZ) whose regulatory region contains the transcription activator's binding site.

[0218] Either hybrid protein alone cannot activate transcription of the reporter gene: the DNA-binding domain hybrid cannot because it does not provide activation function and the activation domain hybrid cannot because it cannot localize to the activator's binding sites. Interaction of the two hybrid proteins reconstitutes the functional activator protein and results in expression of the reporter gene, which is detected by an assay for the reporter gene product.

[0219] The two-hybrid system or related methodology may be used to screen activation domain libraries for proteins that interact with the “bait” gene product. By way of example, and not by way of limitation, BRD1, NHP2L1, PACSIN2, SERHL, PIPPIN, EP300, FAM19A5 and/or GPR24 gene derived peptide products may be used as the bait gene product. Total genomic or cDNA sequences are fused to the DNA encoding an activation domain. This library and a plasmid encoding a hybrid of a bait BRD1, NHP2L1, PACSIN2, SERHL, PIPPIN, EP300, FAM19A5 and/or GPR24 protein, or a fragment thereof, fused to the DNA-binding domain are co-transformed into a yeast reporter strain, and the resulting transformants are screened for those that express the reporter gene. For example, and not by way of limitation, a bait BRD1, NHP2L1, PACSIN2, SERHL, PIPPIN, EP300, FAM19A5 and/or GPR24 gene sequence, such as the open reading frame of the BRD1, NHP2L1, PACSIN2, SERHL, PIPPIN, EP300, FAM19A5 and/or GPR24 gene, can be cloned into a vector such that it is translationally fused to the DNA encoding the DNA-binding domain of the GAL4 protein. These colonies are purified and the library plasmids responsible for reporter gene expression are isolated. DNA sequencing is then used to identify the proteins encoded by the library plasmids.

[0220] A cDNA library of the cell line from which proteins that interact with bait BRD1, NHP2L1, PACSIN2, SERHL, PIPPIN, EP300, FAM19A5 and/GPR24 gene product are to be detected can be made using methods routinely practiced in the art. According to the particular system described herein, for example, the cDNA fragments can be inserted into a vector such that they are translationally fused to the transcriptional activation domain of GAL4. This library can be co-transformed along with the bait BRD1, NHP2L1, PACSIN2, SERHL, PIPPIN, EP300, FAM19A5 and/or GPR24 gene sequence-GAL4 fusion plasmid into a yeast strain that contains a lacZ gene driven by a promoter that contains GAL4 activation sequence. A cDNA encoded protein, fused to GAL4 transcriptional activation domain, that interacts with bait BRD1, NHP2L1, PACSIN2, SERHL, PIPPIN, EP300, FAM19A5 and/or GPR24 gene product will reconstitute an active GAL4 protein and thereby drive expression of the HIS3 gene. Colonies that express HIS3 can be detected by their growth on petri dishes containing semi-solid agar based media lacking histidine. The cDNA can then be purified from these strains, and used to produce and isolate the bait BRD1, NHP2L1, PACSIN2, SERHL, PIPPIN, EP300, FAM19A5 and/or GPR24 protein-interacting protein using techniques routinely practiced in the art.

[0221] The invention also related to screening assays for compounds that interfere with the BRD1, NHP2L1, PACSIN2, SERHL, PIPPIN, EP300, FAM19A5 and/or GPR24 gene products macromolecule interaction.

[0222] The BRD1, NHP2L1, PACSIN2, SERHL, PIPPIN, EP300, FAM19A5 and/or GPR24 gene products of the invention may, in vivo, interact with one or more macromolecules, including intracellular macromolecules, such as proteins. Such macromolecules may include, but are not limited to, nucleic acid molecules and those proteins identified via methods such as those described above. For purposes of this discussion, the macromolecules are referred to herein as “binding partners”. Compounds that are able to disrupt the BRD1, NHP2L1, PACSIN2, SERHL, PIPPIN, EP300, FAM19A5 and GPR24 gene products binding in this way may be useful in regulating the activity of products of the BRD1, NHP2L1, PACSIN2, SERHL, PIPPIN, EP300, FAM19A5 and GPR24 genes, especially variant BRD1, NHP2L1, PACSIN2, SERHL, PIPPIN, EP300, FAM19A5 and GPR24 proteins and thereof derived peptide products. Such compounds may include, but are not limited to molecules such as peptides, and the like, which would be capable of gaining access to a BRD1, NHP2L1, PACSIN2, SERHL, PIPPIN, EP300, FAM19A5 and/or GPR24 gene product.

[0223] The basic principle of the assay systems used to identify compounds that interfere with the interaction between BRD1, NHP2L1, PACSIN2, SERHL, PIPPIN, EP300, FAM19A5 and GPR24 gene products and their binding partner or partners involves preparing a reaction mixture containing the BRD1, NHP2L1, PACSIN2, SERHL, PIPPIN, EP300, FAM19A5 and/or GPR24 gene product, and the binding partner under conditions and for a time sufficient to allow the two to interact and bind, thus forming a complex. In order to test a compound for inhibitory activity, the reaction mixture is prepared in the presence and absence of the test compound. The test compound may be initially included in the reaction mixture, or may be added at a time subsequent to the addition of BRD1, NHP2L1, PACSIN2, SERHL, PIPPIN, EP300, FAM19A5 and/or GPR24 gene product and its binding partner. Control reaction mixtures are incubated without the test compound or with a placebo. The formation of any complexes between the BRD1, NHP2L1, PACSIN2, SERHL, PIPPIN, EP300, FAM19A5 and/or GPR24 gene product and the binding partner is then detected. The formation of a complex in the control reaction, but not in the reaction mixture containing the test compound, indicates that the compound interferes with the interaction of the BRD1, NHP2L1, PACSIN2, SERHL, PIPPIN, EP300, FAM19A5 and/or GPR24 gene product and the interactive binding partner. Additionally, complex formation within reaction mixtures containing the test compound and for example normal (wild type) BRD1, NHP2L1, PACSIN2, SERHL, PIPPIN, EP300, FAM19A5 and/or GPR24 protein may also be compared to complex formation within reaction mixtures containing the test compound and a variant BRD1, NHP2L1, PACSIN2, SERHL, PIPPIN, EP300, FAM19A5 and/or GPR24 protein. This comparison may be important in those cases wherein it is desirable to identify compounds that disrupt interactions of mutant but not wild type BRD1, NHP2L1, PACSIN2, SERHL, PIPPIN, EP300, FAM19A5 and/or GPR24 protein.

[0224] The assay for compounds that interfere with the interaction of BRD1, NHP2L1, PACSIN2, SERHL, PIPPIN, EP300, FAM19A5 and/GPR24 gene products and their binding partners can be conducted in a heterogeneous or homogeneous format. Heterogeneous assays involve anchoring either the BRD1, NHP2L1, PACSIN2, SERHL, PIPPIN, EP300, FAM19A5 and/or GPR24 gene product or the binding partner onto a solid phase and detecting complexes anchored on the solid phase at the end of the reaction. In homogeneous assays, the entire reaction is carried out in a liquid phase. In either approach, the order of addition of reactants can be varied to obtain different information about the compounds being tested. For example, test compounds that interfere with the interaction between the BRD1, NHP2L1, PACSIN2, SERHL, PIPPIN, EP300, FAM19A5 and/or GPR24 gene products and the binding partners, e.g., by competition, can be identified by conducting the reaction in the presence of the test substance; i.e., by adding the test substance to the reaction mixture prior to or simultaneously with the BRD1, NHP2L1, PACSIN2, SERHL, PIPPIN, EP300, FAM19A5 and/or GPR24 gene protein and interactive intracellular binding partner. Alternatively, test compounds that disrupt preformed complexes, e.g., compounds with higher binding constants that displace one of the components from the complex, can be tested by adding the test compound to the reaction mixture after complexes have been formed. The various formats are described briefly below.

[0225] In a heterogeneous assay system, either the BRD1, NHP2L1, PACSIN2, SERHL, PIPPIN, EP300, FAM19A5 and/or GPR24 gene product or the interactive binding partner, is anchored onto a solid surface, while the non-anchored species is labeled, either directly or indirectly. In practice, microtiter plates are conveniently utilized. The anchored species may be immobilized by non-covalent or covalent attachments. Non-covalent attachment may be accomplished simply by coating the solid surface with a solution of the BRD1, NHP2L1, PACSIN2, SERHL, PIPPIN, EP300, FAM19A5 and/or GPR24 gene product or binding partner and drying. Alternatively, an immobilized antibody specific for the species to be anchored may be used to anchor the species to the solid surface. The surfaces may be prepared in advance and stored.

[0226] In order to conduct the assay, the partner of the immobilized species is exposed to the coated surface with or without the test compound. After the reaction is complete, unreacted components are removed (e.g., by washing) and any complexes formed will remain immobilized on the solid surface. The detection of complexes anchored on the solid surface can be accomplished in a number of ways. Where the non-immobilized species is pre-labeled, the detection of label immobilized on the surface indicates that complexes were formed. Where the non-immobilized species is not pre-labelled, an indirect label can be used to detect complexes anchored on the surface; e.g., using a labeled antibody specific for the initially non-immobilized species (the antibody, in turn, may be directly labeled or indirectly labeled with a labeled anti-Ig antibody). Depending upon the order of addition of reaction components, test compounds that inhibit complex formation or that disrupt preformed complexes can be detected.

[0227] Alternatively, the reaction can be conducted in a liquid phase in the presence or absence of the test compound, the reaction products separated from unreacted components, and complexes detected; e.g., using an immobilized antibody specific for one of the binding components to anchor any complexes formed in solution, and a labeled antibody specific for the other partner to detect anchored complexes. Again, depending upon the order of addition of reactants to the liquid phase, test compounds that inhibit complex or that disrupt preformed complexes can be identified.

[0228] In an alternate embodiment of the invention, a homogeneous assay can be used. In this approach, a preformed complex of a BRD1, NHP2L1, PACSIN2, SERHL, PIPPIN, EP300, FAM19A5 and/or GPR24 gene product and the interactive binding partner is prepared in which either the BRD1, NHP2L1, PACSIN2, SERHL, PIPPIN, EP300, FAM19A5 and/or GPR24 gene product or its binding partners is labeled, but the signal generated by the label is quenched due to complex formation (see, e.g., U.S. Pat. No. 4,109,496 by Rubenstein which utilizes this approach for immunoassays). The addition of a test substance that competes with and displaces one of the species from the preformed complex will result in the generation of a signal above background. In this way, test substances that disrupt the BRD1, NHP2L1, PACSIN2, SERHL, PIPPIN, EP300, FAM19A5 and GPR24 gene product/binding partner interaction can be identified.

[0229] In another embodiment, the BRD1, NHP2L1, PACSIN2, SERHL, PIPPIN, EP300, FAM19A5 and/or GPR24 gene product can be prepared for immobilization using recombinant DNA techniques. For example, the BRD1, NHP2L1, PACSIN2, SERHL, PIPPIN, EP300, FAM19A5 and/or GPR24 gene coding region can be fused to the glutathione-S-transferase (GST) gene using a fusion vector, such as pGEX-5X-1, in such a manner that its binding activity is maintained in the resulting fusion protein. The interactive binding partner can be purified and used to raise an antibody, using methods routinely practiced in the art. The antibody can then be labeled with a radioactive isotope such as .sup.125 I, for example, by methods routinely practiced in the art. In a heterogeneous assay, e.g., the GST-BRD1, NHP2L1, PACSIN2, SERHL, PIPPIN, EP300, FAM19A5 and/or GPR24 fusion protein can be anchored to glutathione-agarose beads. The interactive binding partner can then be added in the presence or absence of the test compound in a manner that allows interaction and binding to occur. At the end of the reaction period, unbound material can be washed away, and the labeled monoclonal antibody can be added to the system and allowed to bind to the complexed components. The interaction between the BRD1, NHP2L1, PACSIN2, SERHL, PIPPIN, EP300, FAM19A5 and/or GPR24 gene product and the interactive binding partner can be detected by measuring the amount of radioactivity that remains associated with the glutathione-agarose beads. A successful inhibition of the interaction by the test compound will result in a decrease in measured radioactivity.

[0230] Alternatively, the GST-BRD1, NHP2L1, PACSIN2, SERHL, PIPPIN, EP300, FAM19A5 and/or GPR24 fusion protein and the interactive binding partner can be mixed together in liquid in the absence of the solid glutathione-agarose beads. The test compound can be added either during or after the species are allowed to interact. This mixture can then be added to the glutathione-agarose beads and unbound material is washed away. Again the extent of inhibition of the BRD1, NHP2L1, PACSIN2, SERHL, PIPPIN, EP300, FAM19A5 and/or GPR24 gene product/binding partner interaction can be detected by adding the labelled antibody and measuring the radioactivity associated with the beads.

[0231] In still another embodiment of the invention, these same techniques can be employed using peptide fragments that correspond to the binding domains of BRD1, NHP2L1, PACSIN2, SERHL, PIPPIN, EP300, FAM19A5 and/or GPR24 proteins and/or the interactive or binding partner (in cases where the binding partner is a protein), in place of one or both of the full length proteins. Any number of methods routinely practiced in the art can be used to identify and isolate the binding sites. These methods include, but are not limited to, mutagenesis of the gene encoding one of the proteins and screening for disruption of binding in a co-immunoprecipitation assay. Compensating mutations in the gene encoding the second species in the complex can then be selected. Sequence analysis of the genes encoding the respective proteins will reveal the mutations that correspond to the region of the protein involved in interactive binding. Alternatively, one protein can be anchored to a solid surface using methods described in this Section above, and allowed to interact with and bind to its labeled binding partner, which has been treated with a proteolytic enzyme, such as trypsin. After washing, a short, labelled peptide comprising the binding domain may remain associated with the solid material, which can be isolated and identified by amino acid sequencing. Also, once the gene coding for the segments can be engineered to express peptide fragments of the protein, which can then be tested for binding activity and purified or synthesized.

[0232] For example, and not by way of limitation, a BRD1, NHP2L1, PACSIN2, SERHL, PIPPIN, EP300, FAM19A5 and/or GPR24 gene product can be anchored to a solid material as described above by making a GST-BRD1, NHP2L1, PACSIN2, SERHL, PIPPIN, EP300, FAM19A5 and/or GPR24 fusion protein and allowing it to bind to glutathione agarose beads. The interactive binding partner obtained can be labeled with a radioactive isotope, such as 35 S, and cleaved with a proteolytic enzyme such as trypsin. Cleavage products can then be added to the anchored GST-BRD1, NHP2L1, PACSIN2, SERHL, PIPPIN, EP300, FAM19A5 and/or GPR24 fusion protein and allowed to bind. After washing away unbound peptides, labelled bound material, representing the binding partner binding domain, can be eluted, purified, and analyzed for amino acid sequence by well-known methods. Peptides so identified can be produced synthetically or fused to appropriate facilitative proteins using recombinant DNA technology.

[0233] The invention also provides assays for identification of compounds that ameliorate the BRD1, NHP2L1, PACSIN2, SERHL, PIPPIN, EP300, FAM19A5 and GPR24 gene associated disorders, such as SCH and/or BPD.

[0234] Compounds, including but not limited to binding compounds identified via assay techniques such as those described above can be tested for the ability to ameliorate symptoms of a BRD1, NHP2L1, PACSIN2, SERHL, PIPPIN, EP300, FAM19A5 and/or GPR24 gene associated disorder including a disorder of thought and/or mood, neuropsychiatric disorders including bipolar (BPD), genetically related unipolar affective disorders, delusional disorders, paraphrenia, paranoid psychosis, SCH, schizotypal disorder, schizoaffective disorder, schizoaffective bipolar and genetically related unipolar affective disorders, psychogenic psychosis, catatonia, periodic bipolar and genetically related unipolar affective disorders, cycloid psychosis, schizoid personality disorder, paranoid personality disorder, bipolar and genetically related unipolar affective disorders related affective disorders and subtypes of unipolar affective disorder.

[0235] It should be noted that the assays described herein can identify compounds that affect the BRD1, NHP2L1, PACSIN2, SERHL, PIPPIN, EP300, FAM19A5 and/or GPR24 gene activity by either affecting BRD1, NHP2L1, PACSIN2, SERHL, PIPPIN, EP300, FAM19A5 and GPR24 gene expression or by affecting the level of BRD1, NHP2L1, PACSIN2, SERHL, PIPPIN, EP300, FAM19A5 and GPR24 gene product activity. For example, compounds may be identified that are involved in another step in the pathway in which the BRD1, NHP2L1, PACSIN2, SERHL, PIPPIN, EP300, FAM19A5 and/or GPR24 gene and/or the BRD1, NHP2L1, PACSIN2, SERHL, PIPPIN, EP300, FAM19A5 and/or GPR24 gene product is involved and, by affecting this same pathway may modulate the effect of the BRD1, NHP2L1, PACSIN2, SERHL, PIPPIN, EP300, FAM19A5 and/or GPR24 gene on the development of a neuropsychiatric disorder such as SCH and/or BPD. Such compounds can be used as part of a therapeutic method for the treatment of the disorder.

[0236] Described below are cell-based and animal model-based assays for the identification of compounds exhibiting such an ability to ameliorate symptoms of the BRD1, NHP2L1, PACSIN2, SERHL, PIPPIN, EP300, FAM19A5 and GPR24 gene activity associated with a neuropsychiatric disorder, such SCH and/or BPD.

[0237] First, cell-based systems can be used to identify compounds that may act to ameliorate symptoms of a BRD1, NHP2L1, PACSIN2, SERHL, PIPPIN, EP300, FAM19A5 and/or GPR24 gene associated disorder, such as BPD and/or SCH. Such cell systems can include, for example, recombinant or non-recombinant cell, such as cell lines, that express the BRD1, NHP2L1, PACSIN2, SERHL, PIPPIN, EP300, FAM19A5 and/or GPR24 gene.

[0238] In utilizing such cell systems, cells that express the BRD1, NHP2L1, PACSIN2, SERHL, PIPPIN, EP300, FAM19A5 and/or GPR24 gene may be exposed to a compound suspected of exhibiting an ability to ameliorate symptoms of a BRD1, NHP2L1, PACSIN2, SERHL, PIPPIN, EP300, FAM19A5 and/or GPR24 gene disorder, such as SCH and/or BPD, at a sufficient concentration and for a sufficient time to elicit such an amelioration of such symptoms in the exposed cells. After exposure, the cells can be assayed to measure alterations in the expression of the BRD1, NHP2L1, PACSIN2, SERHL, PIPPIN, EP300, FAM19A5 and/or GPR24 gene, e.g., by assaying cell lysates for the presence of BRD1, NHP2L1, PACSIN2, SERHL, PIPPIN, EP300, FAM19A5 and/or GPR24 gene transcripts (e.g., by Northern analysis) or for the BRD1, NHP2L1, PACSIN2, SERHL, PIPPIN, EP300, FAM19A5 and GPR24 gene translation products expressed by the cell. Compounds that modulate expression of the BRD1, NHP2L1, PACSIN2, SERHL, PIPPIN, EP300, FAM19A5 and/or GPR24 gene are considered to be good candidates as therapeutics.

[0239] Alternatively, the cells are examined to determine whether one or more cellular phenotypes associated with a BRD1, NHP2L1, PACSIN2, SERHL, PIPPIN, EP300, FAM19A5 and/or GPR24 gene disorder, such as SCH and/or BPD, has been altered to resemble a more normal or unimpaired, unaffected phenotype, or a phenotype more likely to produce a lower incidence or severity of disorder symptoms.

[0240] In addition, animal-based systems or models for a BRD1, NHP2L1, PACSIN2, SERHL, PIPPIN, EP300, FAM19A5 and/or GPR24 gene associated disorder, such as SCH and/or BPD, which may include, for example mice, may be used to identify compounds capable of ameliorating symptoms of the disorder. Such animal models may be used as test substrates for the identification of drugs, pharmaceuticals, therapies and interventions that may be effective in treating such disorders. For example, animal models may be exposed to a compound suspected of exhibiting an ability to ameliorate symptoms, at a sufficient concentration and for a sufficient time to elicit such an amelioration of symptoms of a BRD1, NHP2L1, PACSIN2, SERHL, PIPPIN, EP300, FAM19A5 and/or GPR24 gene associated disorder, such as SCH and/or BPD, in the exposed animals. The response of the animals to the exposure may be monitored by assessing the reversal of such symptoms.

[0241] With regard to intervention, any treatments that reverse any aspect of symptoms of a BRD1, NHP2L1, PACSIN2, SERHL, PIPPIN, EP300, FAM19A5 and/or GPR24 gene associated disorder, such as SCH and/or BPD, should be considered as candidates for human therapeutic intervention in such a disorder.

### Therapeutic Treatment

[0242] The present invention relates to a BRD1, NHP2L1, PACSIN2, SERHL, PIPPIN, EP300, FAM19A5 and/or GPR24 gene associated disorder including a disorder of thought and/or mood, neuropsychiatric disorders including bipolar (BPD), genetically related unipolar affective disorders, delusional disorders, paraphrenia, paranoid psychosis, SCH, schizotypal disorder, schizoaffective disorder, schizoaffective bipolar and genetically related unipolar affective disorders, psychogenic psychosis, catatonia, periodic bipolar and genetically related unipolar affective disorders, cycloid psychosis, schizoid personality disorder, paranoid personality disorder, bipolar and genetically related unipolar affective disorders related affective disorders and subtypes of unipolar affective disorder.

[0243] Having identified a group of subjects having a polymorphism as described in the present invention, the invention also relates to the use of compounds directed to decreasing or modulating the effect of the polymorphism for the preparation of a medicament for the treatment of SCH and/or BPD in said subjects.

[0244] The compounds that bind to a BRD1, NHP2L1, PACSIN2, SERHL, PIPPIN, EP300, FAM19A5 and/or GPR24 gene product, intracellular proteins or portions of proteins that interact with a BRD1, NHP2L1, PACSIN2, SERHL, PIPPIN, EP300, FAM19A5 and/or GPR24 gene product, compounds that interfere with the interaction of a BRD1, NHP2L1, PACSIN2, SERHL, PIPPIN, EP300, FAM19A5 and/or GPR24 gene product with intracellular proteins and compounds that modulate the activity of the BRD1, NHP2L1, PACSIN2, SERHL, PIPPIN, EP300, FAM19A5 and GPR24 genes (i.e., modulate the level of the BRD1, NHP2L1, PACSIN2, SERHL, PIPPIN, EP300, FAM19A5 and GPR24 gene expression and/or modulate the level of the BRD1, NHP2L1, PACSIN2, SERHL, PIPPIN, EP300, FAM19A5 and GPR24 gene product activity) are considered to be good candidates for the manufacture of a medicament for treatment of a BRD1, NHP2L1, PACSIN2, SERHL, PIPPIN, EP300, FAM19A5 and/or GPR24 gene associated disorder. Assays may additionally be utilized that identify compounds that bind to the BRD1, NHP2L1, PACSIN2, SERHL, PIPPIN, EP300, FAM19A5 and/or GPR24 gene regulatory sequences (e.g., promoter sequences; see e.g., Platt, 1994, J. Biol. Chem. 269, 28558-28562), and that may modulate the level of BRD1, NHP2L1, PACSIN2, SERHL, PIPPIN, EP300, FAM19A5 and/or GPR24 gene expression. Compounds may include, but are not limited to, small organic molecules, such as ones that are able to cross the blood-brain barrier, gain entry into an appropriate cell and affect expression of the BRD1, NHP2L1, PACSIN2, SERHL, PIPPIN, EP300, FAM19A5 and/or GPR24 gene or some other gene involved in a BRD1, NHP2L1, PACSIN2, SERHL, PIPPIN, EP300, FAM19A5 and/or GPR24 gene dependent regulatory pathway, or intracellular proteins. Such intracellular proteins may for example be involved in the control and/or regulation of mood. Further, among these compounds are compounds that affect the level of BRD1, NHP2L1, PACSIN2, SERHL, PIPPIN, EP300, FAM19A5 and/or GPR24 gene expression and/or the BRD1, NHP2L1, PACSIN2, SERHL, PIPPIN, EP300, FAM19A5 and/or GPR24 gene product activity and that can be used as medicaments in the therapeutic treatment of the BRD1, NHP2L1, PACSIN2, SERHL, PIPPIN, EP300, FAM19A5 and/or GPR24 gene associated disorders, for example neuropsychiatric disorders such as SCH and/or BPD.

[0245] Compounds may include, but are not limited to, peptides such as, for example, soluble peptides, including but not limited to, Ig-tailed fusion peptides, and members of random peptide libraries; (see, e.g., Lam, et al., 1991, Nature 354, 82-84; Houghten, et al., 1991, Nature 354, 84-86), and combinatorial chemistry-derived molecular library made of D- and/or L-configuration amino acids, phosphopeptides (including, but not limited to members of random or partially degenerate, directed phosphopeptide libraries; see, e.g., Songyang, et al., 1993, Cell 72, 767-778), antibodies (including, but not limited to, polyclonal, monoclonal, humanized, anti-idiotypic, chimeric or single chain antibodies, and FAb, F(ab′).sub.2 and Fab expression library fragments, and epitope-binding fragments thereof), and small organic or inorganic molecules. Such compounds may further comprise compounds, in particular drugs or members of classes or families of drugs, known to ameliorate or exacerbate the symptoms of a neuropsychiatric disorder such as bipolar and genetically related unipolar affective disorders with the use of lithium salts, atypical antipsychotics such as ziprasadone, risperidone, clozapine, quetiapine, olanzapine, butyrophenone derivatives such as haloperidol and droperidol, phenothiazaine derivatives such as chlorpromazine, prochloperazine, promazine, trifluopromazine, thioxanthine derivatives such as flupenthixol, chlorprothixene and dibenzodiazepines and antipsychotic antiepileptic drugs such as carbamazepine, and valproic acid. Antidepressant drugs such imipramine, amitryptiline, nortryptiline, prothiaden, doxapine, other tricyclic antidepressants, tetracyclic antidepressants, serotonin reuptake inhibitor antidepressants such as fluoxetine, paroxetine, cipromil, venlafaxine, monoamine oxidase inhibitor antidepressants such as phenelzine, tranylcypromine, isocaboxazid, selegiline, and moclobamide. In addition psychotogenic drugs such as bromocriptine, apomorphine, amphetamine, methylphenidate, methylamphetaime, ketamine. Many of these drugs can be or have been used in combination.

[0246] Compounds identified via assays such as those described herein may be useful, for example, in elaborating the biological function of the BRD1, NHP2L1, PACSIN2, SERHL, PIPPIN, EP300, FAM19A5 and GPR24 gene products, and for ameliorating the BRD1, NHP2L1, PACSIN2, SERHL, PIPPIN, EP300, FAM19A5 and GPR24 gene associated disorders or neuropsychiatric disorders, such as for example SCH and/or BPD.

[0247] In one embodiment of treatment methods, the compounds administered do not comprise compounds, in particular drugs, reported to ameliorate or exacerbate the symptoms of a neuropsychiatric disorder, such as bipolar and genetically related unipolar affective disorders. Such compounds include antidepressants such as lithium salts, flupenthixol, risperidone, clozapine, quetiapine, olanzapine, haloperidol, droperidol, chlorpromazine, prochloperazine, phenothiazaine derivatives, promazine, trifluopromazine, butyrophenone derivatives, thioxanthine derivatives such as chlorprothixene and dibenzodiazepines and antipsychotic antiepileptic drugs such carbamazepine, and valproic acid, reserpine. Psychotogenic drugs such as LSD, bromocriptine, apomorphine, amphetamine, methylphenidate, methylamphetaime, ketamine, Many of these drugs are used in combination.

### 1. Inhibitory Antisense, Ribozyme and Triple Helix Approaches

[0248] In another embodiment, symptoms of certain neuropsychiatric disorders, such as SCH and/or BPD, may be ameliorated by decreasing the level of BRD1, NHP2L1, PACSIN2, SERHL, PIPPIN, EP300, FAM19A5 and/or GPR24 gene expression and/or the BRD1, NHP2L1, PACSIN2, SERHL, PIPPIN, EP300, FAM19A5 and/or GPR24 gene product activity by using the BRD1, NHP2L1, PACSIN2, SERHL, PIPPIN, EP300, FAM19A5 and/or GPR24 gene derived nucleotide sequences in conjunction with well-known antisense, gene “knock-out,” ribozyme and/or triple helix methods to decrease the level of BRD1, NHP2L1, PACSIN2, SERHL, PIPPIN, EP300, FAM19A5 and/or GPR24 gene expression. Among the compounds that may exhibit the ability to modulate the activity, expression of the BRD1, NHP2L1, PACSIN2, SERHL, PIPPIN, EP300, FAM19A5 and/or GPR24 gene and/or synthesis the gene products, including the ability to ameliorate the symptoms of a BRD1, NHP2L1, PACSIN2, SERHL, PIPPIN, EP300, FAM19A5 and/or GPR24 gene disorder, are antisense, ribozyme, and triple helix molecules. Such molecules may be designed to reduce or inhibit either unimpaired, or if appropriate, mutant target gene activity. Techniques for the production and use of such molecules are well known to those of skill in the art.

[0249] Antisense RNA and DNA molecules act to directly block the translation of mRNA by hybridizing to targeted mRNA and preventing protein translation. Antisense approaches involve the design of oligonucleotides that are complementary to a target gene mRNA. The antisense oligonucleotides will bind to the complementary target gene mRNA transcripts and prevent translation. Absolute complementarity, although preferred, is not required.

[0250] A sequence “complementary” to a portion of an RNA, as referred to herein, means a sequence having sufficient complementarity to be able to hybridize with the RNA, forming a stable duplex; in the case of double-stranded antisense nucleic acids, a single strand of the duplex DNA may thus be tested, or triplex formation may be assayed. The ability to hybridize will depend on both the degree of complementarity and the length of the antisense nucleic acid. Generally, the longer the hybridizing nucleic acid, the more base mismatches with an RNA it may contain and still form a stable duplex (or triplex, as the case may be). One skilled in the art can ascertain a tolerable degree of mismatch by use of standard procedures to determine the melting point of the hybridized complex.

[0251] In one embodiment, oligonucleotides complementary to non-coding regions of the BRD1, NHP2L1, PACSIN2, SERHL, PIPPIN, EP300, FAM19A5 and/or GPR24 gene could be used in an antisense approach to inhibit translation of endogenous BRD1, NHP2L1, PACSIN2, SERHL, PIPPIN, EP300, FAM19A5 and/or GPR24 mRNA. Antisense nucleic acids should be at least six nucleotides in length, and are preferably oligonucleotides ranging from 6 to about 50 nucleotides in length. In specific aspects the oligonucleotide is at least 10 nucleotides, at least 17 nucleotides, at least 25 nucleotides or at least 50 nucleotides.

[0252] Regardless of the choice of target sequence, it is preferred that in vitro studies are first performed to quantitate the ability of the antisense oligonucleotide to inhibit gene expression. It is preferred that these studies utilize controls that distinguish between antisense gene inhibition and nonspecific biological effects of oligonucleotides. It is also preferred that these studies compare levels of the target RNA or protein with that of an internal control RNA or protein. Additionally, it is envisioned that results obtained using the antisense oligonucleotide are compared with those obtained using a control oligonucleotide. It is preferred that the control oligonucleotide is of approximately the same length as the test oligonucleotide and that the nucleotide sequence of the oligonucleotide differs from the antisense sequence no more than is necessary to prevent specific hybridization to the target sequence.

[0253] The oligonucleotides can be DNA or RNA or chimeric mixtures or derivatives or modified versions thereof, single-stranded or double-stranded. The oligonucleotide can be modified at the base moiety, sugar moiety, or phosphate backbone, for example, to improve stability of the molecule, hybridization, etc. The oligonucleotide may include other appended groups such as peptides (e.g., for targeting host cell receptors in vivo), or agents facilitating transport across the cell membrane (see, e.g., Letsinger, et al., 1989, Proc. Natl. Acad. Sci. U.S.A. 86, 6553-6556; Lemaitre, et al., 1987, Proc. Natl. Acad. Sci. 84, 648-652; PCT Publication No. WO88/09810, published Dec. 15, 1988) or the blood-brain barrier (see, e.g., PCT Publication No. WO89/10134, published Apr. 25, 1988), hybridization-triggered cleavage agents (see, e.g., Krol et al., 1988, BioTechniques 6, 958-976) or intercalating agents (see, e.g., Zon, 1988, Pharm. Res. 5, 539-549). To this end, the oligonucleotide may be conjugated to another molecule, e.g., a peptide, hybridization triggered cross-linking agent, transport agent, hybridization-triggered cleavage agent, etc.

[0254] The antisense oligonucleotide may comprise at least one modified base moiety which is selected from the group including but not limited to 5-fluorouracil, 5-bromouracil, 5-chlorouracil, 5-iodouracil, hypoxanthine, xanthine, 4-acetylcytosine, 5-(carboxyhydroxylmethyl)uracil, 5-carboxymethylaminomethyl-2-thiouridine, 5-carboxymethylaminomethyluracil, dihydrouracil, beta-D-galactosylqueosine, inosine, N6-isopentenyladenine, 1-methylguanine, 1-methylinosine, 2,2-dimethylguanine, 2-methyladenine, 2-methylguanine, 3-methylcytosine, 5-methylcytosine, N6-adenine, 7-methylguanine, 5-methylaminomethyluracil, 5-methoxyaminomethyl-2-thiouracil, beta-D-mannosylqueosine, 5′-methoxycarboxymethyluracil, 5-methoxyuracil, 2-methylthio-N6-isopentenyladenine, uracil-5-oxyacetic acid (v), wybutoxosine, pseudouracil, queosine, 2-thiocytosine, 5-methyl-2-thiouracil, 2-thiouracil, 4-thiouracil, 5-methyluracil, uracil-5-oxyacetic acid methylester, uracil-5-oxyacetic acid (v), 5-methyl-2-thiouracil, 3-(3-amino-3-N-2-carboxypropyl)uracil, (acp3)w, and 2,6-diaminopurine.

[0255] The antisense oligonucleotide may also comprise at least one modified sugar moiety selected from the group including but not limited to arabinose, 2-fluoroarabinose, xylulose, and hexose.

[0256] In yet another embodiment, the antisense oligonucleotide comprises at least one modified phosphate backbone selected from the group consisting of a phosphorothioate, a phosphorodithioate, a phosphoramidothioate, a phosphoramidate, a phosphordiamidate, a methylphosphonate, an alkyl phosphotriester, and a formacetal or analog thereof.

[0257] In yet another embodiment, the antisense oligonucleotide is an .alpha.-anomeric oligonucleotide. An alpha.-anomeric oligonucleotide forms specific double-stranded hybrids with complementary RNA in which, contrary to the usual .beta.-units, the strands run parallel to each other (Gautier, et al., 1987, Nucl. Acids Res. 15, 6625-6641). The oligonucleotide is a 2′-O-methylribonucleotide (Inoue, et al., 1987, Nucl. Acids Res. 15, 6131-6148), or a chimeric RNA-DNA analogue (Inoue, et al., 1987, FEBS Lett. 215, 327-330).

[0258] Oligonucleotides of the invention may be synthesized by standard methods known in the art, e.g. by use of an automated DNA synthesizer (such as are commercially available from Biosearch, Applied Biosystems, etc.). As examples, phosphorothioate oligonucleotides may be synthesized by the method of Stein, et al. (1988, Nucl. Acids Res. 16, 3209), methylphosphonate oligonucleotides can be prepared by use of controlled pore glass polymer supports (Sarin, et al., 1988, Proc. Natl. Acad. Sci. U.S.A. 85, 7448-7451), etc.

[0259] While antisense nucleotides complementary to the target gene coding region sequence could be used, those complementary to the transcribed, untranslated region are most preferred. For example, antisense oligonucleotides having the following sequences can be utilized in accordance with the invention:

[0260] Antisense molecules should be delivered to cells that express the target gene in vivo. A number of methods have been developed for delivering antisense DNA or RNA to cells; e.g., antisense molecules can be injected directly into the tissue site, or modified antisense molecules, designed to target the desired cells (e.g., antisense linked to peptides or antibodies that specifically bind receptors or antigens expressed on the target cell surface) can be administered systemically.

[0261] However, it is often difficult to achieve intracellular concentrations of the antisense sufficient to suppress translation of endogenous mRNAs. Therefore a preferred approach utilizes a recombinant DNA construct in which the antisense oligonucleotide is placed under the control of a strong pol III or pol II promoter. The use of such a construct to transfect target cells in the patient will result in the transcription of sufficient amounts of single stranded RNAs that will form complementary base pairs with the endogenous target gene transcripts and thereby prevent translation of the target gene mRNA. For example, a vector can be introduced e.g., such that it is taken up by a cell and directs the transcription of an antisense RNA. Such a vector can remain episomal or become chromosomally integrated, as long as it can be transcribed to produce the desired antisense RNA. Such vectors can be constructed by recombinant DNA technology methods standard in the art. Vectors can be plasmid, viral, or others known in the art, used for replication and expression in mammalian cells. Expression of the sequence encoding the antisense RNA can be by any promoter known in the art to act in mammalian, preferably human cells. Such promoters can be inducible or constitutive. Such promoters include but are not limited to: the SV40 early promoter region (Bernoist and Chambon, 1981, Nature 290, 304-310), the promoter contained in the 31 long terminal repeat of Rous sarcoma virus (Yamamoto, et al., 1980, Cell 22, 787-797), the herpes thymidine kinase promoter (Wagner, et al., 1981, Proc. Natl. Acad. Sci. U.S.A. 78, 1441-1445), the regulatory sequences of the metallothionein gene (Brinster, et al., 1982, Nature 296, 39-42), etc. Any type of plasmid, cosmid, YAC or viral vector can be used to prepare the recombinant DNA construct which can be introduced directly into the tissue site. Alternatively, viral vectors can be used that selectively infect the desired tissue, in which case administration may be accomplished by another route (e.g., systemically).

[0262] Ribozyme molecules designed to catalytically cleave target gene mRNA transcripts can also be used to prevent translation of target gene mRNA and, therefore, expression of target gene product. (See, e.g., PCT International Publication WO90/11364, published Oct. 4, 1990; Sarver, et al., 1990, Science 247, 1222-1225).

[0263] Ribozymes are enzymatic RNA molecules capable of catalyzing the specific cleavage of RNA. (For a review, see Rossi, 1994, Current Biology 4, 469-471). The mechanism of ribozyme action involves sequence specific hybridization of the ribozyme molecule to complementary target RNA, followed by an endonucleolytic cleavage event. The composition of ribozyme molecules must include one or more sequences complementary to the target gene mRNA, and must include the well known catalytic sequence responsible for mRNA cleavage. For this sequence, see, e.g., U.S. Pat. No. 5,093,246, which is incorporated herein by reference in its entirety.

[0264] While ribozymes that cleave mRNA at site specific recognition sequences can be used to destroy target gene mRNAs, the use of hammerhead ribozymes is preferred.

[0265] Hammerhead ribozymes cleave mRNAs at locations dictated by flanking regions that form complementary base pairs with the target mRNA. The sole requirement is that the target mRNA have the following sequence of two bases: 5′-UG-3′. The construction and production of hammerhead ribozymes is well known in the art and is described more fully in Myers, 1995, Molecular Biology and Biotechnology: A Comprehensive Desk Reference, VCH Publishers, New York, (see especially FIG. 4, page 833) and in Haseloff and Gerlach, 1988, Nature, 334, 585-591, which is incorporated herein by reference in its entirety.

[0266] Preferably the ribozyme is engineered so that the cleavage recognition site is located near the 5′ end of the target gene mRNA, i.e., to increase efficiency and minimize the intracellular accumulation of non-functional mRNA transcripts. For example, hammerhead ribozymes having the following sequences can be utilized. The ribozymes of the present invention also include RNA endoribonucleases (hereinafter “Cech-type ribozymes”) such as the one that occurs naturally in Tetrahymena thermophila (known as the IVS, or L-19 IVS RNA) and that has been extensively described by Thomas Cech and collaborators (Zaug, et al., 1984, Science, 224, 574-578; Zaug and Cech, 1986, Science, 231, 470-475; Zaug, et al., 1986, Nature, 324, 429-433; published International patent application No. WO 88/04300 by University Patents Inc.; Been and Cech, 1986, Cell, 47, 207-216). The Cech-type ribozymes have an eight base pair active site which hybridizes to a target RNA sequence where after cleavage of the target RNA takes place.

[0267] As in the antisense approach, the ribozymes can be composed of modified oligonucleotides (e.g., for improved stability, targeting, etc.) and should be delivered to cells that express the target gene in vivo. A preferred method of delivery involves using a DNA construct “encoding” the ribozyme under the control of a strong constitutive pol III or pol II promoter, so that transfected cells will produce sufficient quantities of the ribozyme to destroy endogenous target gene messages and inhibit translation. Because ribozymes unlike antisense molecules, are catalytic, a lower intracellular concentration is required for efficiency.

[0268] Endogenous target gene expression can also be reduced by inactivating or “knocking out” the target gene or its promoter using targeted homologous recombination (e.g., see Smithies, et al., 1985, Nature 317, 230-234; Thomas and Capecchi, 1987, Cell 51, 503-512; Thompson, et al., 1989, Cell 5, 313-321; each of which is incorporated by reference herein in its entirety). For example, a mutant, non-functional target gene (or a completely unrelated DNA sequence) flanked by DNA homologous to the endogenous target gene (either the coding regions or regulatory regions of the target gene) can be used, with or without a selectable marker and/or a negative selectable marker, to transfect cells that express the target gene in vivo. Insertion of the DNA construct, via targeted homologous recombination, results in inactivation of the target gene. Such approaches are particularly suited in the agricultural field where modifications to ES (embryonic stem) cells can be used to generate animal offspring with an inactive target gene (e.g., see Thomas and Capecchi, 1987 and Thompson, 1989, supra). However this approach can be adapted for use in humans provided the recombinant DNA constructs are directly administered or targeted to the required site in vivo using appropriate viral vectors.

[0269] Alternatively, endogenous target gene expression can be reduced by targeting deoxyribonucleotide sequences complementary to the regulatory region of the target gene (i.e., the target gene promoter and/or enhancers) to form triple helical structures that prevent transcription of the target gene in target cells in the body. (See generally, Helene, 1991, Anticancer Drug Des., 6(6), 569-584; Helene, et al., 1992, Ann. N.Y. Acad. Sci., 660, 27-36; and Maher, 1992, Bioassays 14(12), 807-815).

[0270] Nucleic acid molecules to be used in triplex helix formation for the inhibition of transcription should be single stranded and composed of deoxynucleotides. The base composition of these oligonucleotides must be designed to promote triple helix formation via Hoogsteen base pairing rules, which generally require sizeable stretches of either purines or pyrimidines to be present on one strand of a duplex. Nucleotide sequences may be pyrimidine-based, which will result in TAT and CGC.sup.+ triplets across the three associated strands of the resulting triple helix. The pyrimidine-rich molecules provide base complementarity to a purine-rich region of a single strand of the duplex in a parallel orientation to that strand. In addition, nucleic acid molecules may be chosen that are purine-rich, for example, contain a stretch of G residues. These molecules will form a triple helix with a DNA duplex that is rich in GC pairs, in which the majority of the purine residues are located on a single strand of the targeted duplex, resulting in GGC triplets across the three strands in the triplex.

[0271] Alternatively, the potential sequences that can be targeted for triple helix formation may be increased by creating a so called “switchback” nucleic acid molecule. Switchback molecules are synthesized in an alternating 5′-3′,3′-5′ manner, such that they base pair with first one strand of a duplex and then the other, eliminating the necessity for a sizeable stretch of either purines or pyrimidines to be present on one strand of a duplex.

[0272] In instances wherein the antisense, ribozyme, and/or triple helix molecules described herein are utilized to inhibit mutant gene expression, it is possible that the technique may so efficiently reduce or inhibit the transcription (triple helix) and/or translation (antisense, ribozyme) of mRNA produced by normal target gene alleles that the possibility may arise wherein the concentration of normal target gene product present may be lower than is necessary for a normal phenotype. In such cases, to ensure that substantially normal levels of target gene activity are maintained, therefore, nucleic acid molecules that encode and express target gene polypeptides exhibiting normal target gene activity may, be introduced into cells via gene therapy methods such as those described, below, in Section 5.9.2 that do not contain sequences susceptible to whatever antisense, ribozyme, or triple helix treatments are being utilized. Alternatively, in instances whereby the target gene encodes an extracellular protein, it may be preferable to co-administer normal target gene protein in order to maintain the requisite level of target gene activity.

[0273] Anti-sense RNA and DNA, ribozyme, and triple helix molecules of the invention may be prepared by any method known in the art for the synthesis of DNA and RNA molecules, as discussed above. These include techniques for chemically synthesizing oligodeoxyribonucleotides and oligoribonucleotides well known in the art such as for example solid phase phosphoramidite chemical synthesis. Alternatively, RNA molecules may be generated by in vitro and in vivo transcription of DNA sequences encoding the antisense RNA molecule. Such DNA sequences may be incorporated into a wide variety of vectors that incorporate suitable RNA polymerase promoters such as the T7 or SP6 polymerase promoters. Alternatively, antisense cDNA constructs that synthesize antisense RNA constitutively or inducibly, depending on the promoter used, can be introduced stably into cell lines.

### 2 Gene Therapy

[0274] Having identified polymorphism(s) as the cause of a disease it is also rendered possible with the present invention to provide a genetic therapy for subjects being diagnosed as having a predisposition according to the invention, said therapy comprising administering to said subject a therapeutically effective amount of a gene therapy vector.

[0275] Having discovered the NHP2L1, PACSIN2, SERHL, PIPPIN, BRD1, EP300, FAM19A5 and/or GPR24 genes as etiological factors in mental diseases, such as SCH and/or BPD, the inventors also provide methods for gene therapy and gene therapy vectors for use in subjects irrespective of whether they carry any of the susceptibility or protective alleles/haplotypes described in the present invention.

[0276] There are various different methods of gene therapy for the subjects defined in the present invention.

[0277] The first two are based on activation of the repair system of the cells by introducing into those cells a gene therapy vector which causes “correction” of the polymorphism by presenting the repair mechanism with a template for carrying out the correction. One such type includes the RNA/DNA chimeraplast, said chimeraplast being capable of correcting the polymorphism in cells of said subject. Examples of the design of such chimeraplasts can be found in e.g. U.S. Pat. No. 5,760,012; U.S. Pat. No. 5,888,983; U.S. Pat. No. 5,731,181; U.S. Pat. No. 6,010,970; U.S. Pat. No. 6,211,351.

[0278] The second method is based on application of single stranded oligonucleotides, wherein the terminal nucleotides is protected from degradation by using 3′ and 5′ phosphorothioat-linkage of the monomers. This gene therapy vector is also capable of “correcting” the polymorphism by replacing one nucleotide with another.

[0279] These first two types of gene therapy vectors comprise a small sequence (less than 50 bases) which overlaps with the polymorphism in question. Suitable sequences for this purpose are genomic sequences located around the polymorphism.

[0280] Other types of gene therapy include the use of retrovirus (RNA-virus). Retrovirus can be used to target many cells and integrate stably into the genome. Adenovirus and adeno-associated virus can also be used. A suitable retrovirus or adenovirus for this purpose comprises an expression construct with the wildtype gene under the control of the wildtype promoter or a constitutive promoter or a regulatable promoter such as a repressible and/or inducible promoter or a promoter comprising both repressible and inducible elements.

[0281] A further group of gene therapy vectors includes vectors comprising interfering RNA (RNAi) for catalytic breakdown of mRNA carrying the polymorphism. RNAi can be used for lowering the expression of a given gene for a relatively short period of time. In particular these RNAi oligos may be used for therapy for both subjects carrying a susceptibility allele as described in the present invention as well as for subjects which do not carry such an allele.

[0282] Interfering RNA (“RNAi”) is double stranded RNA that results in catalytic degradation of specific mRNAs, and can also be used to lower gene expression.

[0283] The gene therapy vectors carry the protective allele of the genes. The protective allele means in the present content that presence of this allele in an individual indicates protection against a mental disease of the invention.

[0284] Described below are methods and compositions whereby a BRD1, NHP2L1, PACSIN2, SERHL, PIPPIN, EP300, FAM19A5 and/or GPR24 gene disorder or a disorder of thought and/or mood, such as bipolar and genetically related unipolar affective disorders, may be treated.

[0285] With respect to an increase in the level of normal BRD1, NHP2L1, PACSIN2, SERHL, PIPPIN, EP300, FAM19A5 AND GPR24 gene expression and/or BRD1, NHP2L1, PACSIN2, SERHL, PIPPIN, EP300, FAM19A5 and GPR24 GENE product activity, the BRD1, NHP2L1, PACSIN2, SERHL, PIPPIN, EP300, FAM19A5 and GPR24 gene derived nucleotide sequences, for example, be utilized for the treatment of a BRD1, NHP2L1, PACSIN2, SERHL, PIPPIN, EP300, FAM19A5 and/or GPR24 gene associated disorder such as SCH and/or BPD. Such treatment can be performed, for example, in the form of gene replacement therapy. Specifically, one or more copies of a normal BRD1, NHP2L1, PACSIN2, SERHL, PIPPIN, EP300, FAM19A5 and/or GPR24 gene or a portion of said gene that directs the production of a gene product exhibiting normal BRD1, NHP2L1, PACSIN2, SERHL, PIPPIN, EP300, FAM19A5 and/or GPR24 gene function, may be inserted into the appropriate cells within a patient, using vectors that include, but are not limited to adenovirus, adeno-associated virus, and retrovirus vectors, in addition to other particles that introduce DNA into cells, such as liposomes.

[0286] Because the BRD1, NHP2L1, PACSIN2, SERHL, PIPPIN, EP300, FAM19A5 and GPR24 genes are expressed in the brain, such gene replacement therapy techniques should be capable delivering the BRD1, NHP2L1, PACSIN2, SERHL, PIPPIN, EP300, FAM19A5 and/or GPR24 gene sequences to these cell types within patients. Thus, in one embodiment, techniques that are well known to those of skill in the art (see, e.g., PCT Publication No. WO89/10134, published Apr. 25, 1988) can be used to enable the BRD1, NHP2L1, PACSIN2, SERHL, PIPPIN, EP300, FAM19A5 and/or GPR24 gene sequences to cross the blood-brain barrier readily and to deliver the sequences to cells in the brain. With respect to delivery that is capable of crossing the blood-brain barrier, viral vectors such as, for example, those described above, are preferable. Also included are methods using liposomes either in vivo ex vivo or in vitro. Wherein the BRD1, NHP2L1, PACSIN2, SERHL, PIPPIN, EP300, FAM19A5 and/or GPR24 gene sense or antisense DNA is delivered to the cytoplasm and nucleus of target cells. Liposomes can deliver the BRD1, NHP2L1, PACSIN2, SERHL, PIPPIN, EP300, FAM19A5 and GPR24 gene sense or nonsense RNA to humans and the human brain or in mammals through intrathecal delivery either as part of a viral vector or as DNA conjugated with nuclear localizing proteins or other proteins that increase take up into the cell nucleus.

[0287] In another embodiment, techniques for delivery involve direct administration of such BRD1, NHP2L1, PACSIN2, SERHL, PIPPIN, EP300, FAM19A5 and/or GPR24 gene sequences to the site of the cells in which the BRD1, NHP2L1, PACSIN2, SERHL, PIPPIN, EP300, FAM19A5 and/or GPR24 gene sequences are to be expressed. Additional methods that may be utilized to increase the overall level of the BRD1, NHP2L1, PACSIN2, SERHL, PIPPIN, EP300, FAM19A5 and/or GPR24 gene expression and/or the BRD1, NHP2L1, PACSIN2, SERHL, PIPPIN, EP300, FAM19A5 and/or GPR24 gene product activity include the introduction of appropriate BRD1, NHP2L1, PACSIN2, SERHL, PIPPIN, EP300, FAM19A5 and/or GPR24 gene-expressing cells, preferably autologous cells, into a patient at positions and in numbers that are sufficient to ameliorate the symptoms of a BRD1, NHP2L1, PACSIN2, SERHL, PIPPIN, EP300, FAM19A5 and/or GPR24 gene associated disorder, such as SCH and/or BPD. Such cells may be either recombinant or non-recombinant.

[0288] Among the cells that can be administered to increase the overall level of BRD1, NHP2L1, PACSIN2, SERHL, PIPPIN, EP300, FAM19A5 and/or GPR24 gene expression in a patient are normal cells, preferably brain cells and also choroid plexus cells within the CNS which are accessible through intrathecal injections. Alternatively, cells, preferably autologous cells, can be engineered to express BRD1, NHP2L1, PACSIN2, SERHL, PIPPIN, EP300, FAM19A5 and/or GPR24 gene sequences, and may then be introduced into a patient in positions appropriate for the amelioration of the symptoms of a BRD1, NHP2L1, PACSIN2, SERHL, PIPPIN, EP300, FAM19A5 and/or GPR24 gene associated disorder. Alternately, cells that express an unimpaired BRD1, NHP2L1, PACSIN2, SERHL, PIPPIN, EP300, FAM19A5 and/or GPR24 gene and that are from a MHC matched individual can be utilized, and may include, for example, brain cells. The expression of the BRD1, NHP2L1, PACSIN2, SERHL, PIPPIN, EP300, FAM19A5 and/or GPR24 gene derived sequences is controlled by the appropriate gene regulatory sequences to allow such expression in the necessary cell types. Such gene regulatory sequences are well known to the skilled artisan. Such cell-based gene therapy techniques are well known to those skilled in the art, see, e.g., Anderson, U.S. Pat. No. 5,399,349.

[0289] When the cells to be administered are non-autologous cells, they can be administered using well known techniques that prevent a host immune response against the introduced cells from developing. For example, the cells may be introduced in an encapsulated form which, while allowing for an exchange of components with the immediate extracellular environment, does not allow the introduced cells to be recognized by the host immune system.

[0290] Additionally, compounds, such as those identified via techniques such as those described above that are capable of modulating the BRD1, NHP2L1, PACSIN2, SERHL, PIPPIN, EP300, FAM19A5 and/or GPR24 gene product activity can be administered using standard techniques that are well known to those of skill in the art. In instances in which the compounds to be administered are to involve an interaction with brain cells, the administration techniques should include well known ones that allow for a crossing of the blood-brain barrier such as intrathecal injection and conjugation with compounds that allow transfer across the blood brain barrier.

[0291] Preferred embodiments of the invention concern the gene therapy vectors comprising
[0292] (i) a DNA sequence selected from the sequences identified as SEQ ID NO 1-7 and 94, or a fragment thereof, wherein said sequence or a said fragment comprises the protective allele of an SNP selected from the SNPs having refSNP IDs: rs11561, rs5758405 rs8779, rs132806, rs2068943, rs2267487, rs881542, rs926333, rs1060387, rs1006407, rs6002408, rs4468, rs138855, rs2239848, rs138880, rs138881, rs20551, rs2294976, rs2076578, rs1046088, rs133068, rs133069, rs133070, rs133073, rs6002408, or
[0293] (ii) a DNA sequence selected from the sequences identified as SEQ ID NOs: 8-14 and 95, or a fragment of said DNA sequence, wherein said DNA sequence or said fragment comprises the protective allele of an SNP selected from the SNPs having refSNP IDs: rs11561, rs5758405 rs8779, rs132806, rs2068943, rs2267487, rs881542, rs926333, rs1060387, rs1006407, rs6002408, rs4468, rs138855, rs2239848, rs138880, rs138881, rs20551, rs2294976, rs2076578, rs1046088, rs133068, rs133069, rs133070, rs133073, rs600240.

### Pharmaceutical Compositions and Methods of Administration

[0294] The compounds that are determined to affect BRD1, NHP2L1, PACSIN2, SERHL, PIPPIN, EP300, FAM19A5 and/or GPR24 gene expression or gene product activity can be administered to a patient at therapeutically effective doses to treat or ameliorate a gene associated disorder, such as SCH and/or BPD. A therapeutically effective dose refers to that amount of the compound sufficient to result in amelioration of symptoms of such a disorder.

[0295] Toxicity and therapeutic efficacy of such compounds can be determined by standard pharmaceutical procedures in cell cultures or experimental animals, e.g., for determining the LD50 (the dose lethal to 50% of the population) and the ED50 (the dose therapeutically effective in 50% of the population). The dose ratio between toxic and therapeutic effects is the therapeutic index and it can be expressed as the ratio LD50/ED50. Compounds that exhibit large therapeutic indices are preferred. While compounds that exhibit toxic side effects may be used, care should be taken to design a delivery system that targets such compounds to the site of affected tissue in order to minimize potential damage to uninfected cells and, thereby, reduce side effects.

[0296] The data obtained from the cell culture assays and animal studies can be used in formulating a range of dosage for use in humans. The dosage of such compounds lies preferably within a range of circulating concentrations that include the ED50 with little or no toxicity. The dosage may vary within this range depending upon the dosage form employed and the route of administration utilized. For any compound used in the method of the invention, the therapeutically effective dose can be estimated initially from cell culture assays. A dose may be formulated in animal models to achieve a circulating plasma concentration range that includes the IC.sub.50 (i.e., the concentration of the test compound that achieves a half-maximal inhibition of symptoms) as determined in cell culture. Such information can be used to more accurately determine useful doses in humans. Levels in plasma may be measured, for example, by high performance liquid chromatography.

[0297] Pharmaceutical compositions for use in accordance with the present invention may be formulated in conventional manner using one or more physiologically acceptable carriers or excipients.

[0298] Thus, the compounds and their physiologically acceptable salts and solvates may be formulated for administration by inhalation or insufflation (either through the mouth or the nose) or intrathecal, oral, buccal, parenteral or rectal administration.

[0299] For oral administration, the pharmaceutical compositions may take the form of, for example, tablets or capsules prepared by conventional means with pharmaceutically acceptable excipients such as binding agents (e.g., pregelatinised maize starch, polyvinylpyrrolidone or hydroxypropyl methylcellulose); fillers (e.g., lactose, microcrystalline cellulose or calcium hydrogen phosphate); lubricants (e.g., magnesium stearate, talc or silica); disintegrants (e.g., potato starch or sodium starch glycolate); or wetting agents (e.g., sodium lauryl sulphate). The tablets may be coated by methods well known in the art. Liquid preparations for oral administration may take the form of, for example, solutions, syrups or suspensions, or they may be presented as a dry product for constitution with water or other suitable vehicle before use. Such liquid preparations may be prepared by conventional means with pharmaceutically acceptable additives such as suspending agents (e.g., sorbitol syrup, cellulose derivatives or hydrogenated edible fats); emulsifying agents (e.g., lecithin or acacia); non-aqueous vehicles (e.g., almond oil, oily esters, ethyl alcohol or fractionated vegetable oils); and preservatives (e.g., methyl or propyl-p-hydroxybenzoates or sorbic acid). The preparations may also contain buffer salts, flavoring, coloring and sweetening agents as appropriate. Preparations for oral administration may be suitably formulated to give controlled release of the active compound.

[0300] For buccal administration the compositions may take the form of tablets or lozenges formulated in conventional manner. For administration by inhalation, the compounds for use according to the present invention are conveniently delivered in the form of an aerosol spray presentation from pressurized packs or a nebuliser, with the use of a suitable propellant, e.g., dichlorodifluoromethane, trichlorofluoromethane, dichlorotetrafluoroethane, carbon dioxide or other suitable gas. In the case of a pressurized aerosol the dosage unit may be determined by providing a valve to deliver a metered amount. Capsules and cartridges of e.g., gelatin for use in an inhaler or insufflator may be formulated containing a powder mix of the compound and a suitable powder base such as lactose or starch.

[0301] The compounds may be formulated for parenteral administration by injection, e.g., by bolus injection or continuous infusion. Formulations for injection may be presented in unit dosage form, e.g., in ampoules or in multi-dose containers, with an added preservative. The compositions may take such forms as suspensions, solutions or emulsions in oily or aqueous vehicles, and may contain formulatory agents such as suspending, stabilizing and/or dispersing agents. Alternatively, the active ingredient may be in powder form for constitution with a suitable vehicle, e.g., sterile pyrogen-free water, before use.

[0302] The compounds may also be formulated in rectal compositions such as suppositories or retention enemas, e.g., containing conventional suppository bases such as cocoa butter or other glycerides.

[0303] In addition to the formulations described previously, the compounds may also be formulated as a depot preparation. Such long acting formulations may be administered by implantation (for example subcutaneously or intramuscularly) or by intramuscular injection. Thus, for example, the compounds may be formulated with suitable polymeric or hydrophobic materials (for example as an emulsion in an acceptable oil) or ion exchange resins, or as sparingly soluble derivatives, for example, as a sparingly soluble salt.

[0304] The compositions may, if desired, be presented in a pack or dispenser device that may contain one or more unit dosage forms containing the active ingredient. The pack may for example comprise metal or plastic foil, such as a blister pack. The pack or dispenser device may be accompanied by instructions for administration.

### EXAMPLES

[0305] In order to identify potential susceptibility variants in the NHP2L1, PACSIN2, SERHL, PIPPIN, BRD1, EP300, FAM19A5 and/or GPR24 genes, the genes were sequenced in a subset of patients with mental disorders. The genomic sequences containing upstream promoter sequences, intronic sequences close to the exon/intron boundaries and coding sequences were analysed. In addition, potential SNPs were identified by searching databases such as the dbSNP (http://www.ncbi.nlm.nih.gov/projects/SNP/). The identified variants were analysed in a case-control sample from Scotland described below.

### Example 1

### Analysis of Unrelated Patients and Ethnically Matched Unrelated Controls from Scotland

### Subjects

[0306] The case-control sample from Scotland consisted of 103 patients with SZ, 162 patients with BPD and 200 ethnically matched controls. Informed consent was obtained from all patients prior to inclusion, and the study was approved by the local research ethical committees where patients were recruited. Subjects were interviewed by an experienced psychiatrist and venous blood taken for subsequent DNA extraction using routine procedures. Diagnoses were made according to DSM-IV criteria after case-note review and personal interview using the Schedule for Affective Disorders and Schizophrenia—Lifetime version. Final diagnoses were reached by consensus between two experienced psychiatrists (DB and WM). Control subjects (prescreened to exclude those with serious chronic illness) were drawn from the same population in South East and South Central Scotland and recruited from Scottish National Blood Transfusion Service donors. We have reported these sample sets previously (17, 18).

### Genotyping

[0307] The genes selected were included on the basis of their location, expression profile and existing knowledge of their function. The selection criteria for the single nucleotide polymorphisms (SNPs) were also based on a functional approach evaluating the type of SNP (prioritizing non-synonymous SNPs) and location (preferably promoter, UTR, intron/exon boundaries, and conserved regions). Genotyping was performed using 40 ng of DNA per multiplex PCR. Exonuclease1 and Shrimp Alkaline Phosphatase were used for purification steps and the SNPs genotyped by multiplex single base extension technology using the ABI SNaP-shot kit and an ABI 310 Genetic Analyzer or a 3100 Avant Genetic Analyzer (Applied Biosystems, Foster City, Calif.) according to the manufacturer's recommendations. The data was analyzed using the GeneScan 3.1.2 program (Applied Biosystems, Foster City, Calif.). Standard PCR conditions were used. The microsatellite markers were analyzed using fluorescent primers, standard conditions for (duplex) PCR amplification and separation of allelic fragments on an ABI 310 Genetic Analyzer. All primer sequences are available on request. To minimize genotyping errors all polymorphisms were scored independently by two experienced investigators. Any discordances lead to re-analysis of the sample. In addition a number of SNPs (including BRD1 rs4468 and rs138880) were analyzed twice in at least 85 individuals. No divergent genotypes were observed, indicating a very low error rate (for allele calls less than 0.006).

### Statistical Analysis

[0308] Chi-square and Fisher's Exact test were used to assess allele and genotype distributions. Haplotype Trend Regression (HTR) was used to estimate the frequency and analyze the distribution of haplotypes (19). When comparing two groups, HTR produces an overall p-value for the observed distribution of all the haplotypes at an interval defined by a set of neighboring markers and also a haplotype-specific p-value describing the likelihood of the observed distribution of each of the individual haplotypes. The p-values from HTR presented in this study are empirical values based on up to 100,000,000 permutations. P-values less than 0.05 are referred to as significant. The p-values presented are not corrected for multiple testing. However, the highly significant haplotype associations remained significant even after a Bonferroni correction, which is overly conservative as the tests performed are not independent.

[0309] Tests of linkage disequilibrium were performed using the program Ldmax from the GOLD software package (http://www.sph.umich.edu/csg/abecasis/GOLD) which uses the Slatkin and Excoffier expectation-maximization based approach (20).

### In Silico Analysis

[0310] The impact of a promoter SNP on potential binding sites for transcription factors was analyzed using the program Matinspector (www.genomatix.de) (21, 22). This program utilizes a library of matrix descriptions for transcription factor binding sites to identify potential sites in a sequence analyzed and assign a quality rating of matches (core and matrix similarity) estimating the influence of a SNP on the binding of transcription factors.

[0311] The possible effect of an intragenic SNP on splicing was investigated using the programs ESEfinder release 2.0 (http://rulai.cshl.edu/tools/ESE) (21-23), RESCUE-ESE Web Server (http://genes.mit.edu/burgelab/rescue-ese) (24), FAS-ESS web server (http://genes.mit.edu/fas-ess/) (25), ExonScan Web Server (http://genes.mit.edu/exonscan/) (24-26) and NNSPLICE (http://www.fruitfly.org/seq_tools/splice) (27).

[0312] The effects of 3′ UTR SNPs on microRNA binding sites were analyzed using the miRBase Targets Pre-release Version 1.0 (http://microrna.sanger.ac.uk/targets/v1/) which is a web resource provided by the Wellcome Trust Sanger Institute containing computationally predicted targets for microRNAs across a number of species.

### Northern Blotting

[0313] Human Multiple Tissue Northern Blots II and V (Clontech Laboratories, CA, USA) were probed with a α-³²P-CTP-labelled probe against BRD1. Full length BRD1 was cloned from human brain cDNA (Clontech, #639300), gel purified (Qiagen, #28704) and used as template for the probe synthesis. The probe was synthesized and labeled using 15,000 Ci/mmol α-³²P-CTP (EasyTides) and the Prime-It RmT Random Primer Labeling Kit (Stratagene, #300392) following the manufacturer's protocol. The specific activity of the probe was measured to 1.3×10⁹ dpm/μg. The blots were hybridized and rinsed as described previously (28) and exposed to X-ray film for 3 weeks.

### Preparation of Rat, Rabbit, Human and Fetal Pig Brain Tissue

[0314] Seven male Wistar rats (250-300 g) and 5 male New Zealand white rabbits (2.5-3.5 kg) were deeply anesthetized before transcardial perfusion with 0.5 I (rats) or 1.5 I (rabbits) phosphate buffered 4% paraformaldehyde (pH 7.4) at 4° C. as approved by the Danish Council for Animal Research Ethics. The brains were immersed in the same fixative for 24 hrs and divided into 2-3 minor coronal tissue blocks by histOmer embedding and sectioning on a HistOtech slicer (29) before vibratome sectioning into 50 μm sections.

[0315] Human brain tissue was obtained from 2 donors who had donated their remains for educational and scientific purposes at the Institute of Anatomy, University of Aarhus. The brains were removed 24-72 hrs postmortem and briefly stored in 10% formalin before smaller tissue blocks containing the frontal cortex were paraffin-embedded and microtome sectioned into 10 μm sections.

[0316] Fetal pig brain tissue was obtained from pregnant sows anesthetized by carbon dioxide and sacrificed by bleeding at embryonic day 40, 60, 80, 100 and 115, respectively. The removed fetal brain tissue was briefly immersed in 10% formalin before tissue blocks containing the forebrain (cortex cerebri) and the hindbrain (lower brainstem and cerebellum) were embedded in paraffin and microtome sectioned into 2 μm sections.

[0317] For quantitative analysis of the mRNA expression, the hippocampus, cortex, basal ganglia, cerebellum and brain stem were dissected from the fetal brains and immediately frozen in liquid nitrogen. After thawing on ice, total RNA was extracted with RNAlater™-ICE (Ambion) according to the manufacturer's protocol.

### Immunohistochemistry

[0318] The anti-BRD1 monoclonal antibody used was provided by Bryan Young and was identical to that used in the initial BRD1 cloning study (30). It was raised against the 11 amino acid peptide RRPFSWEDVDR corresponding to amino acids 692-702 of BRD1. Vibratome and cryostat sections were initially blocked for endogenous biotin before preincubation with 1% Triton X-100 and 0.2% milk (Bidinger, Denmark) in TBS for 30 min followed by incubation at 4° C. with the primary monoclonal antibody (mouse anti-BRD1) diluted 1:500-1:1000 in TBS containing 1% Triton X-100 and 0.2% milk for 72 hrs. After rinsing with TBS and 1% Triton X-100 for 3×15 min, the sections were incubated for 1 hr at room temperature with the secondary antibody (sheep anti-mouse Ig biotin-labeled, Amersham, RPN 1001) diluted 1:200-1:400 in TBS containing 1% Triton X-100 and 0.2% milk. Endogenous peroxidase activity was blocked with a solution of 80 ml TBS with 10 ml H₂O₂ and 10 ml methanol for 10 min. Avidin-peroxidase (Sigma: A 3151) diluted 1:200-1:400 with TBS containing 1% Triton X-100 and 0.2% milk was then applied for 1 hr at room temperature. After rinsing for 3×15 min in TBS+1% Triton X-100, the formed avidin-peroxidase complexes were visualized by incubation for 10 min with diaminobenzidine (DAB) made by dissolving a 10 mg DAB-tablet (Kem-En-Tec Diagnostics A/S) in 10 ml water and immediately before use adding 10 μl of 35% H₂O₂. After mounting and coverslipping with Depex, the sections were analyzed using a light microscope and compared with Nissl-stained sections, securing systematic analysis of consecutive coronal brain levels.

[0319] Paraffin embedded sections were stained according to the above mentioned protocol after initial target retrieval by microwave boiling of the sections for 10 min in a citrate buffer (pH=6.0) and usage of the primary monoclonal mouse anti-BRD1 antibody diluted 1:150.

[0320] Double immunofluorescence staining was performed on vibratome sections incubated for 72 hrs at 4° C. with the primary monoclonal BRD1 antibody diluted 1:500, followed by a 1 hr incubation at room temperature with the secondary antibody (goat anti-mouse Ig FITC-labeled, Abcam, ab6785) diluted 1:600. The sections were then treated with 500 μg RNAseA (Roche, 109 142) for 20 min, before nuclear staining with TO-PRO-3 (Molecular Probes, T3605) diluted 1:1000 for 5 min, followed by mounting and coverslipping with Vecta-shield H1000 and subsequent confocal microscopic analysis.

cDNA Synthesis and Real-Time qPCR

[0321] cDNA was synthesized from 1 μg total RNA in 20 μl reactions using iScript™ cDNA synthesis Kit (Biorad). After synthesis the cDNA was diluted five times with double distilled water. The real-time RT-PCR reactions were made with DyNAmo™SYBR® Green qPCR kit (Finnzymes) in a total volume of 20 μl, using 6 pmol primers specific for pig BRD1 (forward: 5′-GGGCCAAGTGCAGCGGCTAC-3′, reverse: 5′-CTCCATCATCTTCAGCTTGTC). Amplification was carried out on a Biorad iCycler using the following conditions: 95° C. 15 min, (94° C. 10 s, 58° C. 20 s, 72° C. 30 s) 40 repeats, 72° C. 10 min, cooled to 20° C. PCR specificity was controlled by melting curve analysis. All reactions were also run using primers specific for pig-GAPDH as an internal standard

(forward:
5′-GGGGAATTCGCCACCATGGTGAAGGTCGGAGTGAAC-3′,
reverse:
5′-GGGGAATTCGATGACAAGCTTCCCATTCTC-3′).

[0322] The relative standard curve for the real-time qPCR reactions were made from RT-PCR of cDNA from the 115-day-old fetus hippocampus, amplified with the above mentioned conditions. The product was run on a 1% agarose gel, cut out and purified using QIAquick Gel Extraction Kit Protocol (Qiagen). The DNA was diluted and used to produce a relative standard curve showing above 90% PCR efficiency in the area. The specificity of the PCR product was verified by sequencing showing the position of the product to span the last two exons of the gene. Relative quantification of the expression was determined as follows. Three replicates of the threshold cycle for BRD1 (C_{T,X}) and GAPDH(C_{T,R}) were measured. Subtracting each C_{T,R} replicate from each C_{T,X} nine threshold differences (ΔC_{T}) were calculated. Under assumptions of normality and variance homogeneity the temporal change in expression was examined by analysis of variance contrasting to embryonic day 115 the mean threshold difference from each of the other days. P-values are adjusted for the number of contrasts tested using the Sidák method. Note this analysis is a variant of the 2^{-ΔΔC}^{_{T}} method (31) with ΔΔC_{T} equal to the contrasts and results are presented in terms of fold changes 2^{-ΔΔC}^{_{T}} (FIG. 5). Moreover, a polynomial regression model up to third order was determined using a forward inclusion stepwise procedure. The significance of the highest order term is indicated and the resulting regression curve with 95% confidence bands is shown after back-transformation by 2^{-ΔC}^{_{T}} (FIG. 5).

### Results

### Association Analysis

[0323] 5 SNPs in BRD1, 9 SNPs in 4 neighboring genes and two microsatellite markers were selected and genotyped in a Scottish case-control sample, including 103 SZ cases, 162 BPD cases, and 200 controls (Table 1). Rs3752466 turned out to be constant and was consequently excluded from further analysis. No significant deviation from Hardy-Weinberg equilibrium was observed for any of the SNPs in the case or control groups. Single-marker and multi-marker haplotype analysis was performed comparing controls to SZ, BPD, and the two case groups combined. (Table 1 around here).

[0324] Significant single-marker associations were observed for two BRD1 SNPs and D22S1169 (Table 2). The promoter SNP rs138880 showed association in SZ, BPD and the combined case group with p-values of 0.0061, 0.0274 and 0.0046, respectively. The 3′ UTR SNP rs4468 and D22S1169 showed significant association with SZ (P=0.0088 and 0.0214, respectively) but not with BPD. These allelic associations were also found in the analysis of the genotypic distribution with similar p-values (results not shown). (Table 2 around here).

[0325] The haplotype analysis considering the overall distribution of all haplotypes of 2-4 neighboring markers in a sliding window fashion showed comparable results in both disorders (Table 2). Highly significant overall p-values (as low as 0.00001) were observed in especially the 3- and 4-marker analysis involving the BRD1 SNPs rs138855, rs2239848, rs138880 and rs138881. Haplotypes involving the microsatellite markers and the proximal BRD1 SNPs showed primarily association in SZ.

[0326] Analysis of the individual haplotypes revealed that the overall association could be attributed to both “risk” and “protective” haplotypes (Table 3). A 3-marker core haplotype spanning BRD1 SNPs rs138855, rs2239848 and rs138880 had a frequency of around 9% in cases against only 1% in controls, producing a haplotype specific p-value of 10⁻⁰⁶. Removing the rare middle SNP rs2239848 from the analysis resulted in a reduced 2-marker “risk” haplotype (G-C) showing a frequency of ˜10% in cases versus ˜1% in controls (p-value of 2.8×10⁻⁰⁷ in the combined case group). (Table 3 around here).

[0327] “Protective” haplotypes over-represented among controls included both microsatellites, all the BRD1 SNPs and extended into MLC1 (megalencephalic leukoencephalopathy with subcortical cysts 1) (Table 3). These related and rather frequent haplotypes showed primarily significant results when compared to their frequencies in SZ.

### Linkage Disequilibrium

[0328] A high degree of inter-marker linkage disequilibrium (LD) between the SNPs in BRD1 was found in controls and cases (Table 4). Likewise a high LD between the SNPs in MLC1 extending distally to MOV10L1 (Moloney leukemia virus 10-like 1, homolog (mouse)) was seen in both cases and controls. No significant LD was seen between BRD1 and MLC1. (Table 4 around here).

### In Silico Analysis

[0329] Using Matinspector, the two promoter SNPs in BRD1 (Table 1) were analyzed for potential effects on binding sites for transcription factors. The C-allele of rs138880 introduced binding sites for two transcription factors: The zinc finger binding protein factor encoded by ZNF202 which is thought to predominantly regulate genes participating in lipid metabolism (32), and hairy and enhancer of split homolog 1 (HES-1) (showing a high core and matrix similarity), which is a transcriptional repressor inhibiting neural differentiation (33). Rs138881 did not introduce any changes.

[0330] The synonymous BRD1 SNP rs2239848 located in exon 1 was analyzed for effects on exon splicing enhancers (ESE) and exon splicing silencers (ESS). According to ESEfinder the presence of the rare A-allele eliminated a binding site for the SR protein SRp55. However, analysis of the splice site in exon 1 revealed a very strong donor site thus suggesting a very limited potential effect of exon 1 ESEs. Neither RESCUE-ESE nor FAS-ESS identified any effect of rs2239848 on splicing.

[0331] Analysis of intronic and 3′UTR SNPs did not suggest any differential effects of the alleles.

### Northern Blotting

[0332] A BRD1 transcript of the expected size (approximately 4.6 kb) was observed in most of the human brain regions tested, i.e. whole brain, cerebellum, cerebral cortex, medulla, spinal cord, occipital pole, frontal lobe, caudate nucleus, corpus callosum, hippocampus and thalamus (data not shown). A further faint band of a slightly larger size was present in whole brain, cerebellum and cerebral cortex, which suggests alternative splicing of the pre-mRNA that seems to be differently regulated across the human brain.

### Immunohistochemistry

[0333] BRD1-immunostaining showed similar neuronal staining patterns in the adult rat, rabbit, and human cortex cerebri (FIG. 1). The neurons in cortex layers I-VI displayed prominent BRD1 immunoreactivity in the perikaryal cytosol surrounding a weaker granular staining of the nucleus (FIGS. 1-2). BRD1 immunoreactivity was likewise seen in the proximal part of the primary dendrites, whereas the distal dendrites and the axon seemed unstained (FIGS. 1-2). Glial staining was not noted in the human cerebral cortex or any part of the rat and rabbit CNS. Consecutive sectioning and immunostaining of the rat and rabbit brain confirmed that neuronal BRD1 immunoreactivity was distributed throughout the adult nervous system e.g. the cerebrum, brainstem, cerebellum and spinal cord (FIG. 3). (FIGS. 1-3 around here).

[0334] Fetal pig brain tissue of embryonic day 40, 60 (FIGS. 4A-C), 80, 100, and 115 (FIG. 4D-F) revealed dense nuclear staining in the neuroepithelial cell layer and the early differentiated neuroblasts (FIGS. 4A-B). Medium differentiated neuroblasts displayed an intense nuclear and perikaryal cytosolar staining pattern (FIG. 4C), while fully differentiated neurons generally stained more weakly and in particular had a very weak nuclear staining compared to the staining intensity seen in the perikaryal cytosol (FIGS. 4D-F). (FIG. 4 around here).

mRNA Expression in Fetal Pig Brain

[0335] The level of expression of BRD1 mRNA was measured and normalized to the amount of GAPDH mRNA, which was constantly expressed. While the overall trend in the five examined areas of fetal pig brain was the same, the differences in expression levels were most pronounced in cortex cerebri in particular but also in the regions of the brainstem and basal ganglia (FIG. 5). The maximum amount of mRNA was measured at embryonic day 60 in all samples. The two areas that were possible to dissect in the 40-day-old embryo (cortex and cerebellum) showed a lower level of expression. For some areas the abundance of mRNA was also relatively increased at day 80 (brainstem, cortex and basal ganglia). Between embryonic day 80 and 115 BRD1 mRNA expression leveled off. (FIG. 5 around here).

TABLE 1
Genotyped polymorphisms and allele frequencies.

| | | | | | MAF | | |
|---|---|---|---|---|---|---|---|
| Gene | SNP | Location (Mb)^{a} | Type of SNP | Alleles^{b} | Controls | BPD | SZ |
| FAM19A5 | rs132234 | 47.424523 | Intron | C/T | 0.27 | 0.29 | 0.27 |
| FAM19A5 | rs3752466 | 47.466709 | 3′ UTR | C/T | 0.00 | 0.00 | 0.00 |
| | D22S922 | 47.491607 | Microsatellite | | | | |
| | D22S1169 | 47.722917 | Microsatellite | | | | |
| BRD1 | rs4468 | 48.488513 | 3′ UTR | T/C | 0.35 | 0.37 | 0.49 |
| BRD1 | rs138855 | 48.519343 | Intron | G/C | 0.16 | 0.14 | 0.13 |
| BRD1 | rs2239848 | 48.537615 | Syn. | G/A | 0.01 | 0.02 | 0.01 |
| BRD1 | rs138880 | 48.539472 | Promoter | A/C | 0.16 | 0.22 | 0.25 |
| BRD1 | rs138881 | 48.541343 | Promoter | G/A | 0.10 | 0.12 | 0.13 |
| MLC1 | rs6010260 | 48.818300 | Nonsyn. | G/T | 0.13 | 0.14 | 0.16 |
| MLC1 | rs137931 | 48.826710 | Promoter | C/— | 0.26 | 0.22 | 0.27 |
| MLC1 | rs137932 | 48.826857 | Promoter | G/A | 0.25 | 0.22 | 0.27 |
| MOV10L1 | rs3810971 | 48.849123 | Nonsyn. | C/T | 0.24 | 0.26 | 0.20 |
| MOV10L1 | rs2272843 | 48.901923 | Nonsyn. | C/A | 0.15 | 0.13 | 0.12 |
| MAPK8IP2 | rs715519 | 49.328513 | Promoter | C/G | 0.18 | 0.16 | 0.19 |
| MAPK8IP2 | rs916005 | 49.334387 | Intron | G/A | 0.04 | 0.04 | 0.05 |

^{a}According to the UCSC Genome Browser, May 2004 assembly (http://www.genome.ucsc.edu)
^{b}Major allele/minor allele on the +strand (http://www.genome.ucsc.edu)
Nonsyn = Nonsynonymous SNP,
MAF = Minor allele frequency,
Syn. = Synonymous SNP

TABLE 2
Single marker and overall haplotype association analysis

| | | Empirical overall p-values^{a} | | | |
|---|---|---|---|---|---|
| | | Single | | | |
| Gene | SNP | marker | 2-marker | 3-marker | 4-marker |
| BPD + SZ | | | | | |
| FAM19A5 | rs132234 | 0.6116 | | | |
| | D22S922 | 0.5552 | 0.5738 | | |
| | D22S1169 | 0.0383 | 0.4270 | 0.4635 | |
| BRD1 | rs4468 | 0.0215 | 0.3317 | 0.4030 | 0.1853 |
| BRD1 | rs138855 | 0.4186 | 0.3182 | 0.1374 | 0.1149 |
| BRD1 | rs2239848 | 0.3983 | 0.6658 | 0.2092 | 0.2630 |
| BRD1 | rs138880 | 0.0046 | 0.0381 | 0.00005 | 0.0607 |
| BRD1 | rs138881 | 0.1727 | 0.0681 | 0.1550 | 0.0003 |
| MLC1 | rs6010260 | 0.1631 | 0.4043 | 0.2102 | 0.3086 |
| MLC1 | rs137931 | 0.5796 | 0.1604 | 0.1926 | 0.2358 |
| MLC1 | rs137932 | 0.6327 | 0.9210 | 0.4051 | 0.3061 |
| MOV10L1 | rs3810971 | 0.9874 | 0.9882 | 0.8355 | 0.2924 |
| MOV10L1 | rs2272843 | 0.3018 | 0.1966 | 0.4691 | 0.4295 |
| MAPK8IP2 | rs715519 | 0.7976 | 0.7516 | 0.4568 | 0.4123 |
| MAPK8IP2 | rs916005 | 1.0000 | 0.9552 | 0.9786 | 0.7152 |
| BPD | | | | | |
| FAM19A5 | rs132234 | 0.6271 | | | |
| | D22S922 | 0.0885 | 0.8920 | | |
| | D22S1169 | 0.4042 | 0.6196 | 0.4032 | |
| BRD1 | rs4468 | 0.7814 | 0.8945 | 0.8753 | 0.7872 |
| BRD1 | rs138855 | 0.4377 | 0.0769 | 0.5369 | 0.5341 |
| BRD1 | rs2239848 | 0.2501 | 0.5005 | 0.1742 | 0.5517 |
| BRD1 | rs138880 | 0.0274 | 0.0797 | 0.00006 | 0.1877 |
| BRD1 | rs138881 | 0.2473 | 0.1822 | 0.2096 | 0.0013 |
| MLC1 | rs6010260 | 0.4011 | 0.6883 | 0.6108 | 0.5603 |
| MLC1 | rs137931 | 0.2842 | 0.2795 | 0.1011 | 0.4430 |
| MLC1 | rs137932 | 0.3229 | 0.8343 | 0.3976 | 0.2014 |
| MOV10L1 | rs3810971 | 0.5368 | 0.8155 | 0.8016 | 0.7716 |
| MOV10L1 | rs2272843 | 0.5064 | 0.1395 | 0.3280 | 0.3263 |
| MAPK8IP2 | rs715519 | 0.4675 | 0.6392 | 0.3063 | 0.4475 |
| MAPK8IP2 | rs916005 | 0.8427 | 0.8895 | 0.8328 | 0.3167 |
| SZ | | | | | |
| FAM19A5 | rs132234 | 0.7013 | | | |
| | D22S922 | 0.3501 | 0.5950 | | |
| | D22S1169 | 0.0214 | 0.0194 | 0.0426 | |
| BRD1 | rs4468 | 0.0088 | 0.0184 | 0.0657 | 0.0228 |
| BRD1 | rs138855 | 0.5010 | 0.1138 | 0.0117 | 0.0839 |
| BRD1 | rs2239848 | 1.0000 | 0.5944 | 0.0470 | 0.0095 |
| BRD1 | rs138880 | 0.0061 | 0.1610 | 0.00001 | 0.0203 |
| BRD1 | rs138881 | 0.2896 | 0.0521 | 0.1358 | 0.0002 |
| MLC1 | rs6010260 | 0.0823 | 0.3103 | 0.0763 | 0.1593 |
| MLC1 | rs137931 | 0.8440 | 0.1836 | 0.3326 | 0.1100 |
| MLC1 | rs137932 | 0.7615 | 0.8969 | 0.2821 | 0.4183 |
| MOV10L1 | rs3810971 | 0.3431 | 0.8971 | 0.9061 | 0.1839 |
| MOV10L1 | rs2272843 | 0.2701 | 0.3417 | 0.7132 | 0.7849 |
| MAPK8IP2 | rs715519 | 0.7254 | 0.6423 | 0.5626 | 0.5239 |
| MAPK8IP2 | rs916005 | 0.8482 | 0.9765 | 0.9187 | 0.7463 |

^{a}Empirical overall p-values based on 100,000,000 permutations using the HTR program.
P-values <0.05 in bold

TABLE 3
Distribution of selected individual haplotypes.

| Haplotype | | | | | | | | | | | Haplotype frequency | | | Empirical p-values^{a} | | |
|---|---|---|---|---|---|---|---|---|---|---|---|---|---|---|---|---|
| S1 | M1 | M2 | S2 | S3 | S4 | S5 | S6 | S7 | S8 | S9 | Controls | BPD | SZ | Combined | BPD | SZ |
| “Risk” haplotypes | | | | | | | | | | | | | | | | |
| | | | | G | | C | | | | | 0.0105 | 0.0937 | 0.0993 | 2.8 × 10−07 | 1.6 × 10−06 | 1 × 10−06 |
| | | | | G | | C | A | | | | 0.0080 | 0.0591 | 0.0667 | 4 × 10−05 | 1 × 10−04 | 2 × 10−04 |
| | | | | G | | C | G | | | | 0.0027 | 0.0258 | 0.0326 | 0.0022 | 0.0018 | 0.0015 |
| | | | | G | G | C | | | | | 0.0105 | 0.0895 | 0.0951 | 1 × 10−06 | 3 × 10−06 | 4 × 10−06 |
| | | | | G | G | C | A | | | | 0.0081 | 0.0611 | 0.0663 | 2 × 10−05 | 8 × 10−05 | 2 × 10−04 |
| | 2 | 3 | C | | | | | | | | <0.0001 | <0.0001 | 0.0577 | 0.0248 | — | 0.0120 |
| “Protective” haplotypes | | | | | | | | | | | | | | | | |
| | | 2 | T | | | | | | | | 0.2743 | 0.0797 | 0.1253 | 1.5 × 10−4 | 0.0389 | 5 × 10−4 |
| | 1 | 2 | T | | | | | | | | 0.1740 | 0.0442 | 0.0300 | 1.8 × 10−04 | 0.0865 | 4.3 × 10−04 |
| | 1 | 5 | T | | | | | | | | 0.0585 | 0.0536 | <0.0001 | 0.0134 | 0.6006 | 0.0042 |
| | 1 | 2 | T | G | | | | | | | 0.2120 | 0.0675 | 0.0104 | 4 × 10−05 | 0.0811 | 8.4 × 10−04 |
| | 1 | 5 | T | G | | | | | | | 0.0458 | 0.0387 | <0.0001 | 0.0207 | 0.5625 | 0.0046 |
| | 1 | 2/5 | T | G | | | | | | | 0.2463 | 0.1672 | 0.0119 | 5.7 × 10−06 | 0.0691 | 7.8 × 10−06 |
| | | 2 | T | G | G | | | | | | 0.2930 | 0.1330 | 0.0843 | 9.2 × 10−05 | 0.0461 | 2.5 × 10−04 |
| | | 5 | T | G | G | | | | | | 0.0401 | <0.0001 | <0.0001 | 0.0044 | 0.0334 | 0.0090 |
| | | | | | | A | G | | | | 0.8378 | 0.7830 | 0.7640 | 0.0232 | 0.0658 | 0.0314 |
| | | | | | | A | G | G | | | 0.7369 | 0.6672 | 0.6185 | 0.0114 | 0.0785 | 0.0061 |
| | | | | | | A | G | G | C | | 0.5678 | 0.5072 | 0.3913 | 0.0254 | 0.2936 | 0.0019 |
| | | | | | | A | G | G | C | G | 0.5693 | 0.5038 | 0.3912 | 0.0211 | 0.2452 | 0.0014 |
| | | | T | G | G | A | G | G | C | G | 0.3898 | 0.2554 | 0.2402 | 0.0030 | 0.1486 | 0.0039 |
| | | | T | G | G | A | | | | | 0.6313 | 0.5795 | 0.4809 | 0.0189 | 0.4404 | 0.0100 |
| | | | | G | | A | | | | | 0.8315 | 0.7685 | 0.7666 | 0.0217 | 0.0414 | 0.0683 |

^{a}Empirical haplotype specific p-values based on 100 000 000 permutations using the HTR program.
P-values <0.05 in bold
S2 to S9 correpond to SNP rs4468, rs138855, rs2239848, rs138880, rs138881, rs6010260, rs137931, and rs137932
M1 to M2 correpond to D22S922 and D22S1169.

TABLE 4
Intermarker linkage disequilibrium measured by D′.
Cases above and right of diagonal, controls below and left of diagonal.

| Gene | SNP | S1 | M1 | M2 | S2 | S3 | S4 | S5 | S6 | S7 | S8 | S9 | S10 | S11 | S12 | S13 |
|---|---|---|---|---|---|---|---|---|---|---|---|---|---|---|---|---|
| FAM19A5 | rs132234 (S1) | | 0.05 | 0.06 | 0.12 | 0.53 | 1.00 | 0.39 | <0.01 | 0.09 | 0.08 | 0.10 | 0.04 | 0.03 | 0.14 | 0.27 |
| | D22S922 (M1) | 0.08 | | 0.13 | 0.02 | 0.44 | 0.12 | 0.07 | 0.06 | 0.21 | 0.02 | 0.00 | 0.00 | 0.07 | 0.02 | 0.06 |
| | D22S116 [symbol] (M2) | 0.13 | 0.22 | | 0.15 | 0.16 | 0.44 | 0.14 | 0.16 | 0.22 | 0.11 | 0.14 | 0.19 | 0.34 | 0.08 | 0.25 |
| BRD1 | rs4468 (S2) | 0.14 | 0.25 | 0.28 | | 0.84 | 1.00 | 0.95 | 1.00 | 0.06 | 0.42 | 0.42 | 0.04 | 0.15 | 0.06 | 0.15 |
| BRD1 | rs138855 (S3) | 0.04 | 0.06 | 0.17 | 0.90 | | 0.59 | 0.91 | 0.39 | 0.47 | 0.17 | 0.17 | 0.12 | 0.03 | 0.05 | <0.01 |
| BRD1 | rs223984 [symbol] (S4) | 1.00 | <0.01 | <0.01 | 1.00 | 1.00 | | 1.00 | 0.69 | 1.00 | 0.11 | 0.11 | 0.18 | 0.85 | 0.20 | 1.00 |
| BRD1 | rs138880 (S5) | 0.08 | 0.09 | 0.20 | 0.92 | 0.94 | 1.00 | | 0.98 | 0.31 | 0.07 | 0.07 | 0.05 | 0.09 | 0.01 | 0.09 |
| BRD1 | rs138881 (S6) | 0.20 | 0.01 | 0.40 | 0.85 | 0.89 | 1.00 | 1.00 | | 0.04 | 0.19 | 0.19 | 0.07 | 0.07 | 0.12 | 1.00 |
| MLC1 | rs601026 [symbol] (S7) | <0.01 | 0.44 | 0.15 | 0.02 | 0.19 | 1.00 | 0.03 | 0.07 | | 1.00 | 1.00 | 0.53 | 1.00 | 0.29 | <0.01 |
| MLC1 | rs137931 (S8) | 0.30 | 0.10 | 0.29 | 0.45 | 0.01 | <0.01 | 0.06 | 0.23 | 0.97 | | 0.99 | 0.93 | 1.00 | 0.06 | 0.03 |
| MLC1 | rs137932 (S9) | 0.29 | 0.09 | 0.29 | 0.45 | 0.01 | 0.01 | 0.06 | 0.24 | 0.96 | 1.00 | | 0.93 | 1.00 | 0.06 | 0.04 |
| MOV10L1 | rs381097 (S10) | 0.31 | 0.13 | 0.16 | 0.05 | 0.53 | 0.04 | 0.70 | 0.71 | 0.54 | 0.87 | 1.00 | | 0.95 | <0.01 | 0.16 |
| MOV10L1 | rs227284 [symbol] (S11) | 0.32 | 0.18 | 0.20 | 0.06 | 0.56 | 0.28 | 0.79 | 1.00 | 1.00 | 0.81 | 1.00 | 1.00 | | 0.03 | 0.19 |
| MAPK8IP2 | rs715519 (S12) | 0.13 | 0.13 | 0.27 | 0.58 | <0.01 | 1.00 | 0.16 | 0.15 | 0.22 | 0.06 | 0.08 | <0.01 | 0.10 | | <0.01 |
| MAPK8IP2 | rs916005 (S13) | 0.89 | 0.29 | 0.52 | 0.20 | 0.11 | 1.00 | 0.16 | 0.10 | 1.00 | 0.34 | 0.33 | 0.20 | 0.34 | 0.50 | |

Significant (P < 0.05) D′ values >0.7 in bold [symbol]
indicates data missing or illegible when filed

### Example 2

### Analysis of Distantly Related Patients and Unrelated Controls from the Faeroe Islands (with Focus on GPR24)

### Subjects

[0336] Two samples were analyzed, one from the Faeroe Islands and one from Scotland. Informed consent was obtained from all patients prior to inclusion, and the study was approved by the local research ethical committees where the patients were recruited. The patients from the Faeroe Islands are well-documented cases of severe SZ or BPD treated at the Department of Psychiatry, National Hospital, Torshavn and thoroughly interviewed and diagnosed by experienced psychiatrists according to ICD10 diagnostic criteria for research and DSMIV (Jorgensen et al. 2002a). The genealogy of the distantly related 17 individuals with BPD and the 11 individuals with SZ was deduced from information on birth, marriages, and deaths in church and civic records of the Faeroese, and could be tracked back to a common ancestor born around 1600 (FIG. 3). The average number of generations relating two patients in the genealogically shortest possibly way through one of the parents were six for patients with SZ and seven for patients with BPD. The sample included the cases previously analyzed for shared chromosome 22 segments using microsatellite markers (Jorgensen et al. 2002a) and four additional cases, one patient with SZ and three with BPD. The control group consisted of 44 unrelated persons (22 couples each with a single offspring) from the Faeroe Islands without a history of psychiatric disease. Haplotypes for chromosomal segments consisting of two to four neighboring markers were determined for cases on the basis of either available parental genotypes or genotypes of spouse and a child when available. All controls had their haplotype reconstructed from the genotypes of their offspring. This method will reconstruct the majority of relatively short haplotypes correctly

(FIG. 3 about Here)

[0337] The case-control sample from Scotland consisted of 103 patients with SZ, 162 patients with BPD and 200 ethnically matched controls. The cases were diagnosed using SADS-L interview and RDC and DSM-IV criteria (Borglum et al. 2001; Borglum et al. 2003). The controls were from the Blood Transfusion Service, Edinburgh, and were screened to exclude people with serious chronic illness. Genomic DNA was isolated from blood samples according to standard procedures.

### Sequencing and Genotyping

[0338] Sequencing was carried out using 100 ng of DNA to perform PCR amplification, JETquick PCR Purification kit (Genomed GmbH, www.genomed-dna.com) for purification of the PCR product, and ABI BigDye kit for direct sequencing on an ABI310 Genetic Analyzer (Applied Biosystems, Foster City, Calif.). Sequences were analyzed in both directions. Genotyping of the selected SNPs was performed using 40 ng of DNA per multiplex PCR, Exonuclease1 and Shrimp Alkaline Phosphatase were used for purification steps and the SNPs were genotyped by multiplex single base extension technology using the ABI SNaP-shot kit and an ABI 310 Genetic Analyzer or a 3100 Avant Genetic Analyzer (Applied Biosystems, Foster City, Calif.) according to the manufacturer's recommendations. The data was analyzed using ABI 310 GeneScan 3.1.2 (Applied Biosystems, Foster City, Calif.). Standard PCR conditions were used for both sequencing and genotyping. Scoring of genotypes was performed by two investigators independently and in case of disagreement the sample was re-analyzed.

[0339] In order to further control for genotyping errors all SNPs were analyzed twice in at least 50 individuals, the GPR24SNPs were analyzed twice in 100 individuals. No discordant genotypes were observed, indicating that the error rate was very low (for allele calls less than 0.01).

[0340] The microsatellite marker D22S279 was analyzed in the four newly ascertained Faeroese cases and the Scottish sample using fluorescent primers, standard conditions for PCR amplification, and separation of allelic fragments on an ABI310 Genetic Analyzer (Applied Biosystems, Foster City, Calif.).

### Statistical Analysis

### The Faroese Population

[0341] The data from the 6 polymorphic SNPs genotyped in the Faeroese sample and the new D22S279 genotypes were merged with the D22S279 genotypes produced by Jorgensen et al. (Jorgensen et al. 2002a), and a test of association was performed as implemented in CLUMP (Sham and Curtis 1995). The test is a modification of a Chi-squared test simulating the distribution of the test statistic using a Monte Carlo approach. The program evaluates all alleles or haplotypes in one test and is therefore sensitive to situations where more than one allele or haplotype are more frequent in either of the groups analyzed. In addition the Monte Carlo approach counteracts the invalidation of the asymptotic sampling distribution of the Chi-squared statistics potentially introduced by polymorphic markers. The p-values derived from CLUMP presented in this paper are from the subtests T1 and T4, which are the most reliable parameters when analyzing extended haplotypes. T1 is the standard Pearson χ² statistics of the 2×N contingency table and T4 is obtained by reshuffling alleles or haplotypes of a 2×2 table until χ² has reached a maximum, thereby comparing any combination of alleles or haplotypes with the rest. In the analysis of specific haplotypes, test of associations were performed using Fisher's Exact test.

[0342] Classical case-control analysis might detect differences between cases and controls owing to ignored population substructure or improperly accounted relatedness among individuals not necessarily owing to true association between a marker and a trait.

[0343] In the present dataset genealogical information is available for cases only (one of several genealogical routes is shown in FIG. 3), while the genealogy for controls remains unknown. In order to get an idea of how related controls are and whether they fall into the same genealogy as cases, we calculated pair-wise estimates of genetic relatedness (r) for all pairs and average relatedness estimates (r*) for pairs within the two groups (cases and controls), but also for case-control pairs. Relatedness or relationship coefficients are defined as the proportion of genes/loci in one individual with alleles identical to these of a reference individual. Estimates of genetic relatedness were calculated using the algorithms developed by Queller & Goodnight (Queller and Goodnight 1989) as implemented in SPAGeDi 1.2 (Hardy and Vekemans 2002). Average within and between group relatedness estimates were obtained using 60 randomly selected unlinked markers, standard errors were obtained by jack-knifing over loci. Parametric t-tests were used to test whether there were significant differences in average relatedness. Pair-wise relatedness coefficients for each pair of individuals were estimated using 660 markers more of less randomly distributed through out the genome (made available from an unpublished study). Using 660 markers of which some would be linked non-independent markers would overestimate the effective number of loci, resulting in underestimation of the variance (standard error). The actual value of relatedness coefficient based on all 660 markers should, however, be very accurate. Estimates of pair-wise genetic distances between individuals were obtained using the algorithm developed by Rousset (Rousset 2000) as implemented in SPAGEDi 1.2 (Hardy and Vekemans 2002). Pair-wise genetic distances were used in a multidimensional scaling algorithm (Alscal procedure—as implemented in SPSS 11.5) to map similarity between individuals relative to each other. The population structure including the genetic differentiation within the case-control sample was evaluated by Wright's F-statistics. The 60 unlinked markers were used to calculate the genetic distance between the case and control group using Wright's F_{ST}. Under the hypothesis of no differentiation between the individuals and populations a null distribution of F_{IT}, F_{IS} and F_{ST} values was obtained by performing 3,000 permutations of individual genotypes among all individuals (F_{IT}), among individuals within populations (F_{IS}) and among populations (F_{ST}) as implemented in SPAGEDi 1.2 (Hardy and Vekemans 2002).

### The Scottish Population

[0344] For each of the seven polymorphic SNPs genotyped in the Scottish sample Chi-square and Fisher's Exact test were used to assess allele and genotype distribution and the program Haplotype Trend Regression (HTR) was used to estimate the frequency and analyze the distribution of haplotypes (Zaykin et al. 2002). When comparing two groups HTR produces an overall p-value for the observed distribution of all the haplotypes of a given segment and in addition a haplotype-specific p-value describing the likelihood of the observed distribution of each of the specific haplotypes. The p-values from HTR presented in this study are empirical values based on 100,000 permutations. In both samples analyzed the controls were compared to individuals with BPD, to individuals with SZ and to the two groups combined. P-values less than 0.05 are referred to as significant. No correction for multiple testing was performed.

[0345] Pair-wise linkage disequilibrium was tested using the Slatkin and Excoffier expectation-maximization algorithm (Excoffier and Slatkin 1995) as implemented in Ldmax from the GOLD software package (http://www.sph.umich.edu/csg/abecasis/GOLD/index.html).

### In Silico Analyses

[0346] The impact of a promoter SNP on potential binding sites for transcription factors was analyzed using the program Matinspector (www.genomatix.de) (Quandt et al. 1995; Werner 2000). This program utilizes a library of matrix descriptions for transcription factor binding sites to identify potential sites in a sequence analyzed and assign a quality rating of matches (core and matrix similarity) estimating the influence of a SNP on the binding of transcription factors. The possible effect of an intragenic SNP on splicing was investigated using the programs ESEfinder release 2.0 (http://rulai.cshl.edu/tools/ESE) (Cartegni et al. 2003; Quandt et al. 1995; Werner 2000), RESCUE-ESE Web Server (http://genes.mit.edu/burgelab/rescue-ese) (Fairbrother et al. 2002) and NNSPLICE (http://www.fruitfly.org/seq_tools/splice) (Reese et al. 1997). ESEfinder identifies putative exon splicing enhancers (ESE) responsive to the human SR proteins SF2/ASF, SC35, SRp40 and SRp55. RESCUE-ESE Web Server predicts which sequences have ESE activity by statistical analysis of exon-intron and splice site compositions. NNSPLICE analyze the structure of the donor and the acceptor sites using a neural network recognizer.

### Results

### SNPs

[0347] In search for potential susceptibility variants the coding region (1269 bp in 2 exons), intron-exon boundaries, and the promoter region (500 bp upstream to the transcription initiation site) of GPR24 were sequenced in five individuals with SZ, four with BPD and one control person from the Faeroese sample. Two SNPs (rs133070 and rs133073) were identified. In addition the dbSNP database (http://www.ncbi.nlm.nih.gov/SNP) and the genome browser of University of California Santa Cruz (http://www.genome.ucsc.edu/) were used for selection of two additional SNPs in GPR24, two SNPs in ADSL and two SNPs in ST13 (Table 1). Eight markers (including D22S279) were genotyped in the sample from the Faeroe Islands and all 10 markers in the Scottish sample. Rs5757921 and rs133071 turned out to be monomorphic and were excluded from further analysis. All SNPs were found to be in Hardy-Weinberg equilibrium in both samples (results not shown).

(Table 1 about Here)

[0348] Association Analysis of the Faeroese Sample

[0349] The Faeroese sample was analyzed using CLUMP comparing the controls to individuals with BPD, to individuals with SZ and to the two groups combined, and significant associations in all 3 groups were observed (Table 2).

[0350] Several single markers showed significant association. The three GPR24SNPs rs133068, rs133069 and rs133073 showed association with SZ yielding p-values of 0.008-0.02. In BPD and BPD/SZ combined, single marker association was observed for rs909669 (ADSL) and rs133070 (GPR24) with p-values between 0.0036 and 0.037.

[0351] Significantly skewed overall distribution of 2-, 3-, and 4-marker haplotypes involving all four GPR24SNPs were found when comparing controls to BPD with T1 p-values as low as 0.0009. The strongest signal was centered on 2-marker haplotypes from rs133069 to rs133073 in GPR24. When comparing controls to SZ unequal haplotype distribution was observed for 2-, 3-, 4- and 5-marker haplotypes spanning all four SNPs in GPR24 in addition to rs909669 in ADSL with a 5-marker haplotype showing a T4 p-value of 0.0054. Similarly, comparing controls to the combined group of cases revealed significant associations with 2-, 3-, 4- and 5-marker haplotypes spanning the SNPs in GPR24 as well as rs909669 in ADSL. The strongest signal was observed for the same 2-marker haplotypes as in BPD (minimal p-value of 0.004) and the 4-/5-marker haplotypes yielding maximum signals in SZ (p-values as low as 0.002).

(Table 2 about Here)

[0352] The distribution of the specific haplotypes contributing to the overall signal is summarized in Table 3. The overall signal in BPD was strongest for 2- and 3-marker haplotypes involving rs133069 to rs133073. The specific 2-marker haplotype containing the G and C alleles of the GPR24 SNPs rs133070 and rs133073, respectively, was present in 9% of the chromosomes in bipolar cases and 39% in controls yielding a p-value of 0.0165. Another 2-marker haplotype A-C involving the same SNPs had a frequency of 23% in BPD and 0% in controls (p-value of 0.0048).

[0353] In SZ the overall signal appeared strongest for 5-marker haplotypes spanning the segment from rs909669 to rs133070. This signal was mainly due to the 5-marker haplotype C7CCA, which was overrepresented in cases. It was present in 90% of the chromosomes in SZ against only 9% in the controls giving a p-value of 5×10⁻⁶. A more modest overall signal appearing in 2-marker haplotypes covering rs909669 to rs133069 was due to part of the same specific 5-marker haplotype described above.

[0354] The overall signal in the combined group reflected the strongest of the signals in BPD and SZ and correlated to the same specific haplotypes. The specific 5-marker haplotype straddling rs909660 to rs133070 as seen in SZ (C7CCA) showed a p-value of 0.0006 in the combined sample, and together with a variant of this haplotype (C6CCA) the haplotypes C-6/7-CCA were overrepresented in cases with a frequency of 75% against only 22% in controls (p-value of 7×10⁻⁵). Finally, the same specific 2- and 3-marker haplotypes covering rs133069 to rs133073 as seen in BPD showed p-values as low as 0.0183 in the combined sample (Table 3).

(Table 3 about Here)

[0355] The within group estimates of relatedness among cases with bipolar affective disorder did not differ significantly from the between group relatedness estimates (r_{bp}=−0.0272±0.0107 vs. r_{bp< >sz+con}=−0.0203±0.0040, t_{17,72}=0.7102, p=0.4795), nor did the average relatedness among cases with schizophrenia differ significantly from the between group relatedness estimate (r_{sz}=−0.0223±0.0126 vs. r_{sz< >bp+con}=−0.0152±0.0045, t_{11,72}=0.5675, p=0.5719). Considering the combined dataset of cases; the within group relatedness estimate of cases for both disorder did not differ significantly from the estimated relatedness between the case and control group (r_{bp+sz}=−0.0208±0.0063 vs. r_{bp+sz< >con}=−0.0189±0.0023, t_{28,72}=0.3536, p=0.7244). Individuals within the two case groups (considered separately and together) are therefore not significantly more related to each other than they are to individuals outside the group. However, the within group estimate did differ significantly from the between group estimate for controls (r_{con}=−0.0059±0.0041 vs. r_{con< >bp+sz}=−0.0189±0.0023, t_{44,72}=2.9902, p=0.0034), indicating that controls are in fact on average more related to each other than they are to individuals outside the group.

[0356] Overall within group estimated relatedness did not differ significantly from the average between group relatedness estimate (r_{within group}=−0.0143±0.0005 vs. r_{between groups}=−0.0185±0.0024, t_{72,72}=1.7132, p=0.0889).

[0357] Multidimensional scaling of pair-wise genetic distances (Rousset 2000) between individuals did not reveal an overall clustering of cases in relation to controls (results not shown). Based on the pair-wise estimates of relatedness or genetic distance between each pair of individuals, some individuals appeared to be more related than the population average, thus sharing more alleles than expected based on the population allele frequencies. This was, however, not consistently within groups.

[0358] The amount of genetic differentiation (F_{ST}) between cases and controls was not statistically significant (F_{ST}=0.0014, P_{two-tailed}=0.4595, 3,000 permutations). Likewise there was no evidence for inbreeding within individuals neither relative to the total sample nor relative to subgroups (F_{IT}=−0.0008, P_{two-tailed}=0.9180; F_{IS}=−0.0022; P_{two-tailed}=0.8121, 3,000 permutations, when cases and controls are considered as two subpopulations). Combining the two case groups did, however, reveal genetic differentiation among the case groups and the control group (F_{ST}=0.0034, P_{two-tailed}=0.0330; F_{IT}=0.0004, P_{two-tailed}=0.9540; F_{IS}=−0.0030, P_{two-tailed}=0.7414, 3,000 permutations), increasing the risk for false-positive findings when combining the two disorders.

### Association Analysis of the Scottish Case-Control Sample

[0359] In the Scottish sample only D22S279 showed significant single marker association with SZ, while haplotype analysis revealed significant associations in both disorders (Table 4). In BPD a minimal overall p-value of 0.0003 was observed for haplotypes including all four GPR24 SNPs. In SZ the maximal signal was slightly more proximal, including 2 GPR24 SNPs and D22S279 (p=0.0005). In the combined group of cases similar but less significant associations were observed.

(Table 4 about Here)

[0360] Some of the “risk” haplotypes identified in the Faeroese sample were also found over-represented among the Scottish patients (Table 5). These (C)₇CCA(T) haplotypes were predominantly over-represented in Faeroese SZ and in the Scottish BP, while the related (C)2CCA haplotypes, which were not present in the Faeroese population, were over-represented among Scottish SZ patients. The rest of the individual haplotypes found associated in the Scottish sample differed from those identified in the Faeroese sample. For example the 2-marker haplotypes containing either the 2, 4 or 8 allele of D22S279 in conjunction with the GPR24 rs133068 G-allele, which had a combined frequency of 9.3% in SZ versus 1.5% in controls (p=9.8×10⁻⁵).

(Table 5 about Here)

### Linkage Disequilibrium

[0361] A high degree of intermarker linkage disequilibrium (LD) was observed especially between the closely located SNPs in GPR24, extending to some degree to the more distal ST13 SNP rs710193 in the Scottish sample, and in the Faeroese sample centromeric to ADSL (Table 6).

(Table 6 about Here)

### In Silico Analysis

[0362] Using the Matinspector (www.genomatix.de) the different alleles of the four promoter SNPs (Table 1) were analyzed for potential effects on binding sites for transcription factors. The C allele of the GPR24 SNP rs133068 introduced a binding site for the transcription factor ZBP-89 whereas the G allele introduced a binding site for X-box binding protein RFX1. In both cases a high core- and matrix similarity were seen. The C allele of rs133069 introduced binding sites for SP1, TGFbeta, RREB1, ZBP-89 and ZIC2 of which especially ZBP-89 and ZIC2 showed high core and matrix similarity. Particularly the transcription factor ZIC2 is interesting since the ZIC genes play an important role in neural development (Aruga 2004). For rs133070 and rs909669 alternative alleles did not cause any changes.

[0363] The synonymous GPR24 SNP rs133073 was analyzed for effects on exon splicing enhancers (ESE) and donor and acceptor sites. ESEfinder identified a single potential exon splicing enhancer that only appeared when the T allele was present, creating a binding site for the splicing factor SRp40 with the score 3.3, which is just above the threshold of 2.67 indicating a significant score.

TABLE 1
Genotyped polymorphisms and allele frequencies in samples from the Faeroe Islands and Scotland.

| | | | | | MAF, Faeroe Islands | | | MAF, Scotland | | |
|---|---|---|---|---|---|---|---|---|---|---|
| Gene | Marker | Location (Mb)^{a} | Type of marke | Alleles^{b} | Controls | BPD | SZ | Controls | BPD | SZ |
| ADSL | rs909669 | 39.066917 | Promoter | C/T | 0.15 | 0.00 | 0.00 | 0.10 | 0.11 | 0.15 |
| ADSL | rs5757921 | 39.067154 | Nonsyn | G/A | NG | NG | NG | 0.00 | 0.00 | 0.00 |
| | D22S279 | 39.347314 | Microsattelite | | — | — | — | — | — | — |
| GPR24 | rs133068 | 39.398907 | Promoter | C/G | 0.45 | 0.42 | 0.15 | 0.48 | 0.47 | 0.49 |
| GPR24 | rs133069 | 39.398962 | Promoter | C/A | 0.48 | 0.59 | 0.15 | 0.49 | 0.47 | 0.48 |
| GPR24 | rs133070 | 39.399273 | Promoter | A/G | 0.44 | 0.16 | 0.22 | 0.42 | 0.42 | 0.39 |
| GPR24 | rs133071 | 39.399732 | Promoter | C/T | 0.00 | 0.00 | 0.00 | 0.00 | 0.00 | 0.00 |
| GPR24 | rs133073 | 39.400195 | Synonymous | T/C | 0.50 | 0.41 | 0.19 | 0.41 | 0.45 | 0.41 |
| ST13 | rs710193 | 39.547690 | Nonsyn | C/T | 0.20 | 0.16 | 0.22 | 0.10 | 0.12 | 0.13 |
| ST13 | rs1573745 | 39.565335 | Intron | G/A | NG | NG | NG | 0.07 | 0.05 | 0.10 |

^{a}According to the UCSC Genome Browser, May 2004 assembly (http://www.genome.ucsc.edu)
^{b}Major allele/minor allele on the +strand (http://www.genome.ucsc.edu)
Nonsyn = Nonsynonymous SNP,
MAF = Minor allele frequency,
NG = Not genotyped

TABLE 2
T1 and T4 p-values from CLUMP association analysis of the Faeroese sample.

| | | Single marker | | 2-marker | | 3-marker | | 4-marker | | 5-marker | |
|---|---|---|---|---|---|---|---|---|---|---|---|
| Gene | Marker | T1 | T4 | T1 | T4 | T1 | T4 | T1 | T4 | T1 | T4 |
| BPD + SZ | | | | | | | | | | | |
| ADSL | rs909669 | 0.0036 | 0.0036 | | | | | | | | |
| | D22S279 | 0.0705 | 0.0268 | 0.0805 | 0.0501 | | | | | | |
| GPR24 | rs133068 | 0.1461 | 0.1461 | 0.1818 | 0.1270 | 0.4823 | 0.3996 | | | | |
| GPR24 | rs133069 | 0.0740 | 0.0740 | 0.0716 | 0.1107 | 0.2017 | 0.2023 | 0.2672 | 0.2064 | | |
| GPR24 | rs133070 | 0.0116 | 0.0116 | 0.0145 | 0.0828 | 0.0525 | 0.1831 | 0.0064 | 0.0023 | 0.0059 | 0.0031 |
| GPR24 | rs133073 | 0.0546 | 0.0546 | 0.0040 | 0.0188 | 0.0268 | 0.0626 | 0.0479 | 0.1278 | 0.0063 | 0.0023 |
| ST13 | rs710193 | 0.7631 | 0.7631 | 0.4522 | 0.4361 | 0.1158 | 0.1697 | 0.1755 | 0.2417 | 0.1722 | 0.239 |
| SZ | | | | | | | | | | | |
| ADSL | rs909669 | 0.1178 | 0.1178 | | | | | | | | |
| | D22S279 | 0.0322 | 0.0174 | 0.0447 | 0.008 | | | | | | |
| GPR24 | rs133068 | 0.0197 | 0.0197 | 0.0542 | 0.0476 | 0.0990 | 0.0353 | | | | |
| GPR24 | rs133069 | 0.0100 | 0.0100 | 0.0469 | 0.0353 | 0.1870 | 0.1727 | 0.1481 | 0.0495 | | |
| GPR24 | rs133070 | 0.2107 | 0.2107 | 0.3299 | 0.3299 | 0.4456 | 0.4456 | 0.0426 | 0.0367 | 0.0156 | 0.0054 |
| GPR24 | rs133073 | 0.0083 | 0.0083 | 0.5104 | 0.5104 | 0.3269 | 0.3269 | 0.4486 | 0.4486 | 0.0432 | 0.0375 |
| ST13 | rs710193 | 0.7065 | 0.7065 | 0.3844 | 0.3368 | 0.3917 | 0.5842 | 0.3957 | 0.5862 | 0.3932 | 0.5852 |
| BPD | | | | | | | | | | | |
| ADSL | rs909669 | 0.0373 | 0.0373 | | | | | | | | |
| | D22S279 | 0.3548 | 0.2390 | 0.4799 | 0.3873 | | | | | | |
| GPR24 | rs133068 | 0.8365 | 0.8365 | 0.4893 | 0.5473 | 0.8745 | 0.7353 | | | | |
| GPR24 | rs133069 | 0.6815 | 0.6815 | 0.6484 | 0.5936 | 0.5063 | 0.4663 | 0.7976 | 0.5424 | | |
| GPR24 | rs133070 | 0.0195 | 0.0195 | 0.0030 | 0.0159 | 0.0316 | 0.0972 | 0.1531 | 0.1076 | 0.2957 | 0.1557 |
| GPR24 | rs133073 | 0.4217 | 0.4217 | 0.0009 | 0.0093 | 0.0042 | 0.0303 | 0.0433 | 0.0997 | 0.1521 | 0.1056 |
| ST13 | rs710193 | 1.0000 | 1.0000 | 0.8264 | 0.8600 | 0.0850 | 0.1940 | 0.1753 | 0.2821 | 0.1745 | 0.2831 |

P-values <0.05 in bold

TABLE 3
Distribution of selected individual haplotypes from CLUMP analysis of the sample from
the Faeroe Islands.

| Haplotype | | | | | | Haplotype frequency | | | | P-values | | |
|---|---|---|---|---|---|---|---|---|---|---|---|---|
| S1 | M | S2 | S3 | S4 | S5 | Controls | BPD | SZ | BPD + SZ | BPD | SZ | BPD + SZ |
| “Risk” haplotypes | | | | | | | | | | | | |
| C | 7 | C | C | A | | 0.09 | 0.28 | 0.90 | 0.50 | 0.1179 | 5 × 10−6 | 0.0006 |
| C | 6 | C | C | A | | 0.13 | 0.39 | 0.00 | 0.25 | 0.0406 | 0.5569 | 0.3176 |
| C | 6/7 | C | C | A | | 0.22 | 0.67 | 0.90 | 0.75 | 0.0026 | 0.0002 | 7 × 10−5 |
| | 7 | C | C | A | T | 0.15 | 0.39 | 0.64 | 0.44 | 0.2868 | 0.0013 | 0.0139 |
| | 6 | C | C | A | T | 0.12 | 0.28 | 0.14 | 0.28 | 0.0340 | 1.0000 | 0.2166 |
| | 6/7 | C | C | A | T | 0.26 | 0.67 | 0.78 | 0.72 | 0.0076 | 0.0013 | 0.0005 |
| | | | | A | C | 0.00 | 0.23 | 0.00 | 0.14 | 0.0048 | 1.0000 | 0.0234 |

| “Protective” haplotypes | | | | | | | | | | |
|---|---|---|---|---|---|---|---|---|---|---|
| | A | G | | 0.38 | 0.08 | 0.22 | 0.16 | 0.0393 | 0.3279 | 0.0364 |
| | A | G | C | 0.38 | 0.10 | 0.21 | 0.15 | 0.0307 | 0.3279 | 0.0526 |
| | | G | C | 0.39 | 0.09 | 0.21 | 0.14 | 0.0165 | 0.3286 | 0.0183 |

P-values <0.05 in bold
S1 to S5 correpond to SNP: rs909669, rs133068, rs133069, rs133070, rs133073.
M = D22S279.

TABLE 4
Single marker and haplotype association analysis in the
case-control sample from Scotland

| | | Empirical overall p-values^{a} | | | | |
|---|---|---|---|---|---|---|
| | | Single | | 3- | 4- | 5- |
| Gene | SNP | marker | 2-marker | marker | marker | marker |
| BPD + SZ | | | | | | |
| ADSL | rs909660 | 0.2189 | | | | |
| D22S279 | | 0.4644 | 0.0490 | | | |
| GPR24 | rs133068 | 0.8538 | 0.1821 | 0.0319 | | |
| GPR24 | rs133069 | 0.7126 | 0.1791 | 0.3066 | 0.0591 | |
| GPR24 | rs133070 | 0.6721 | 0.4592 | 0.5945 | 0.3363 | 0.3390 |
| GPR24 | rs133073 | 0.5632 | 0.0262 | 0.0155 | 0.0184 | 0.1747 |
| ST13 | rs710193 | 0.2317 | 0.1247 | 0.0715 | 0.0790 | 0.1895 |
| ST13 | rs1573745 | 0.7989 | 0.4429 | 0.0632 | 0.1346 | 0.2604 |
| SZ | | | | | | |
| ADSL | rs909660 | 0.0655 | | | | |
| D22S279 | | 0.0277 | 0.0012 | | | |
| GPR24 | rs133068 | 0.8145 | 0.0054 | 0.0015 | | |
| GPR24 | rs133069 | 0.8734 | 0.1238 | 0.0005 | 0.0012 | |
| GPR24 | rs133070 | 0.3638 | 0.0618 | 0.0691 | 0.0053 | 0.0497 |
| GPR24 | rs133073 | 0.8469 | 0.1879 | 0.0148 | 0.0135 | 0.0189 |
| ST13 | rs710193 | 0.2758 | 0.3269 | 0.2240 | 0.1069 | 0.1460 |
| ST13 | rs1573745 | 0.2879 | 0.1394 | 0.2105 | 0.2465 | 0.1871 |
| BPD | | | | | | |
| ADSL | rs909660 | 0.6833 | | | | |
| D22S279 | | 0.5453 | 0.0580 | | | |
| GPR24 | rs133068 | 0.6757 | 0.6295 | 0.3278 | | |
| GPR24 | rs133069 | 0.6748 | 0.3582 | 0.7233 | 0.5948 | |
| GPR24 | rs133070 | 0.9373 | 0.1855 | 0.0779 | 0.3612 | 0.4471 |
| GPR24 | rs133073 | 0.3470 | 0.1471 | 0.0053 | 0.0003 | 0.0410 |
| ST13 | rs710193 | 0.3292 | 0.1197 | 0.2251 | 0.0252 | 0.0018 |
| ST13 | rs1573745 | 0.1588 | 0.5903 | 0.1230 | 0.3998 | 0.1587 |

^{a}Empirical overall p-values based on 100,000 permutations using the HTR program.
P-values <0.05 in bold.

TABLE 5
Distribution of selected individual haplotypes in
the case-control sample from Scotland.

| Haplotype | | | | | | | Haplotype frequency | | | Empirical p-values^{a} | | |
|---|---|---|---|---|---|---|---|---|---|---|---|---|
| S1 | M | S2 | S3 | S4 | S5 | S6 | Controls | BPD | SZ | BPD | SZ | BPD + SZ |
| “Risk” haplotypes | | | | | | | | | | | | |
| C | 7 | C | C | A | | | 0.1564 | 0.2459 | 0.1783 | 0.0520 | 0.8847 | 0.1120 |
| | 7 | C | C | A | | | 0.1560 | 0.2518 | 0.1660 | 0.0221 | 0.8869 | 0.1040 |
| | 7 | C | C | A | T | | 0.1663 | 0.2470 | 0.1659 | 0.0499 | 0.9698 | 0.1966 |
| C | 2 | | | | | | 0.0115 | <0.0001 | 0.0909 | 0.2349 | 0.0005 | 0.1118 |
| | 2 | C | C | A | | | 0.0039 | <0.0001 | 0.0604 | 0.4531 | 0.0022 | 0.1005 |
| | 8 | G | | | | | 0.0037 | 0.0173 | 0.0219 | 0.0691 | 0.0229 | 0.0559 |
| | 2 | G | | | | | 0.0074 | <0.0001 | 0.0434 | 0.1632 | 6.90 × 10−4 | 0.1366 |
| | 4 | G | | | | | 0.0037 | 0.0038 | 0.0287 | 1.0000 | 0.0247 | 0.3235 |
| | 2/4/8 | G | | | | | 0.0148 | 0.0208 | 0.0934 | 0.6185 | 9.78 × 10−5 | 0.0152 |
| | 2/4/8 | G | A | | | | 0.0147 | 0.0208 | 0.0942 | 0.6200 | 9.40 × 10−5 | 0.0150 |
| T | 5 | | | | | | <0.0001 | 0.0355 | 0.0405 | 0.0041 | 0.0025 | 0.0058 |
| T | 5 | G | | | | | <0.0001 | 0.0180 | 0.0246 | 0.0164 | 0.0134 | 0.0181 |
| T | 5 | G | A | | | | <0.0001 | 0.0179 | 0.0250 | 0.0191 | 0.0136 | 0.0179 |
| T | | G | A | G | | | 0.0169 | 0.0621 | 0.0380 | 0.0474 | 0.3964 | 0.0330 |
| T | | G | A | G | C | | 0.0129 | 0.0619 | 0.0236 | 0.0296 | 0.4308 | 0.0263 |
| “Protective” haplotypes | | | | | | | | | | | | |
| | | G | A | G | T | | 0.0202 | <0.0001 | <0.0001 | 0.0257 | 0.0675 | 0.0006 |
| | | | A | G | T | | 0.0202 | <0.0001 | <0.0001 | 0.0264 | 0.0683 | 0.0006 |
| | | | | G | T | | 0.0254 | 0.0041 | <0.0001 | 0.0252 | 0.0279 | 0.0050 |
| | | G | A | A | T | | 0.0537 | 0.0082 | 0.0897 | 0.0021 | 0.0841 | 0.4945 |
| | | G | A | A | | | 0.0522 | 0.0162 | 0.0977 | 0.0256 | 0.0442 | 0.9692 |
| | | | A | A | T | | 0.0537 | 0.0165 | 0.0949 | 0.0247 | 0.0534 | 0.8646 |
| C | 3 | | | | | | 0.2634 | 0.2675 | 0.1704 | 0.8912 | 0.0314 | 0.2608 |
| C | 5 | | | | | | 0.1718 | 0.1531 | 0.0958 | 0.7527 | 0.0534 | 0.2421 |
| C | 3/5 | | | | | | 0.4353 | 0.4203 | 0.2662 | 0.7444 | 0.0018 | 0.0750 |
| C | 5 | G | A | | | | 0.1614 | 0.1307 | 0.0719 | 0.5996 | 0.0247 | 0.1250 |
| C | 3/5 | G | | | | | 0.3199 | 0.3208 | 0.2080 | 0.9939 | 0.0204 | 0.2432 |
| | 3/5 | G | | | | | 0.3339 | 0.3454 | 0.2256 | 0.8470 | 0.0351 | 0.3597 |

^{a}Empirical overall p-values based on 100,000 permutations using the HTR program.
P-values <0.05 in bold.
S1 to S6 correpond to SNP: rs909669, rs133068, rs133069, rs133070, rs133073, rs710193.
M = D22S279.

TABLE 6
Intermarker linkage disequilibrium measured by D′.
Cases above and right of diagonal, controls below and left of diagonal.

| Gene | SNP | | S1 | M | S2 | S3 | S4 | S5 | S6 | S7 |
|---|---|---|---|---|---|---|---|---|---|---|
| Faeroese sample | | | | | | | | | | |
| ADSL | rs909669 | (S1) | | 0.00 | 0.00 | 0.00 | 0.00 | 0.00 | 0.00 | |
| | D22S279 | (M) | 0.30 | | 0.73 | 0.73 | 0.82 | 0.84 | 0.54 | |
| GPR24 | rs133068 | (S2) | 0.68 | 0.43 | | 1.00 | 1.00 | 0.92 | 0.41 | |
| GPR24 | rs133069 | (S3) | 0.72 | 0.52 | 1.00 | | 1.00 | 0.91 | 0.41 | |
| GPR24 | rs133070 | (S4) | 1.00 | 0.46 | 1.00 | 1.00 | | 1.00 | 0.36 | |
| GPR24 | rs133073 | (S5) | 0.75 | 0.58 | 0.94 | 1.00 | 1.00 | | 0.39 | |
| ST13 | rs710193 | (S6) | 1.00 | 0.43 | 0.61 | 0.61 | 1.00 | 0.64 | | |
| Scottish sample | | | | | | | | | | |
| ADSL | rs909669 | (S1) | | 0.32 | 0.10 | 0.11 | 0.14 | 0.01 | 0.05 | 0.20 |
| | D22S279 | (M) | 0.46 | | 0.38 | 0.37 | 0.48 | 0.46 | 0.23 | 0.23 |
| GPR24 | rs133068 | (S2) | 0.19 | 0.46 | | 0.95 | 0.93 | 0.92 | 0.58 | 0.60 |
| GPR24 | rs133069 | (S3) | 0.20 | 0.46 | 0.99 | | 0.89 | 0.89 | 0.56 | 0.60 |
| GPR24 | rs133070 | (S4) | 0.58 | 0.55 | 0.94 | 0.95 | | 0.99 | 0.51 | 0.85 |
| GPR24 | rs133073 | (S5) | 0.55 | 0.61 | 0.91 | 0.92 | 0.95 | | 0.48 | 0.86 |
| ST13 | rs710193 | (S6) | 1.00 | 0.70 | 0.90 | 0.89 | 0.90 | 0.90 | | 0.63 |
| ST13 | rs1573745 | (S7) | 0.28 | 0.55 | 0.42 | 0.43 | 0.49 | 0.61 | 1.00 | |

Significant (P < 0.05) D′ values >0.7 in bold

### Example 3

### Association in Three Different Case-Control Samples

### Subjects

[0364] Three Caucasian case-control samples from Scotland, UK and Denmark respectively were analyzed. All patients gave informed consent prior to inclusion, and study approval was obtained from the local research ethical committees where the patients were recruited.

[0365] The case-control sample from Scotland consisted of 103 patients with SZ, 162 patients with BPD and 200 ethnically matched controls. The subjects suffering from SZ or BPD were interviewed using the Schizophrenia and Affective Disorder Schedule-Lifetime Schedule (SADS-L) 40 (SADS-L) interview and diagnosed according to RDC and DSM-IV criteria.^{41,42} The controls were from the Blood Transfusion Service, Edinburgh, and were screened to exclude people with serious chronic illness.^{43,44}

[0366] The UK sample consisted of 300 individuals with BPD, 265 individuals with SZ and 314 screened normal controls. The BPD cases and controls were included if both parents and all four grandparents were of Irish, Welsh, Scottish or English ancestry as defined by an ancestry checklist. In the selection of the SZ cases one of the grand parents was allowed to be of Caucasian European origin but not of Jewish or non-European Union ancestry (EU countries before the 1994 enlargement). All subjects, were interviewed with the SADS-L by a psychiatrist and diagnosed according to RDC criteria. Cases with bipolar disorder were all bipolar 1 disorder. In the SZ group patients with schizoaffective bipolar disorder or schizo-mania were not included.

[0367] The controls were selected on the basis of not having a family history of schizophrenia, alcoholism or bipolar disorder and for not having a past or present personal history of any defined mental disorder.⁴⁵

[0368] The Danish sample consisted of 124 bipolar patients, 115 individuals suffering from schizophrenia and 96 ancestrally matched unscreened controls. Only patients with an age of onset below 35 were included. Cases were interviewed using the semi-structured interview SCAN version 2.1.⁴⁶ and best estimate diagnoses according to ICD-10-DCR⁴⁷ and DSM-IV⁴⁸ were made by two psychiatrists. All bipolar cases met the ICD-10-DCR diagnostic criteria for bipolar affective disorder and bipolar I disorder (DSM-IV).

[0369] The 115 individuals suffering from schizophrenia were first ever admitted cases fulfilling DSM-IV and ICD-10-DCR criteria for schizophrenia.

### Genotyping and Sequencing

[0370] Genomic DNA was isolated from blood samples according to standard procedures. Sequencing was carried out using 100 ng of DNA to perform PCR amplification, JETquick PCR Purification kit (Genomed GmbH, www.genomed-dna.com) for purification of the PCR product, and ABI BigDye kit for direct sequencing on an ABI310 Genetic Analyzer (Applied Biosystems, Foster City, Calif.). Sequences were analyzed in both directions.

[0371] Genotyping was carried out using the ABI SNaP-shot kit (Applied Biosystems, Foster City, Calif.), an ABI 310 Genetic Analyzer or a 3100 Avant Genetic Analyzer (Applied Biosystems, Foster City, Calif.), and the program ABI 310 GeneScan 3.1.2 (Applied Biosystems, Foster City, Calif.). Primer sequences were obtained from dbSNP (www.ncbi.nlm.nih.gov/SNP). PCR was performed with up to 5 primer sets simultaneously using 40 ng of DNA and standard PCR conditions (primer sequences and PCR conditions are available on request). The PCR products were treated with Exonuclease1 and Shrimp Alkaline Phosphatase, and the multiplex single base extension was carried out according to the manufacturer's recommendations (Applied Biosystems, Foster City, Calif.).

[0372] To control for genotyping errors all SNPs were scored independently by two investigators. Any discordances lead to re-analysis of the sample. Furthermore a number of SNPs (including SERHL rs881542) were analyzed twice in at least 85 individuals. No divergent genotypes were observed, indicating a very low error rate.

### Statistical Analysis

[0373] The data from the polymorphic SNPs genotyped in the samples from Scotland, Denmark, and the UK were analyzed using the program Haplotype Trend Regression (HTR), which estimate the frequency and the distribution of single markers and haplotypes.⁴⁹ When comparing two groups HTR produce an overall p-value for the observed distribution of all the different haplotypes. In addition HTR produce a haplotype-specific p-value describing the likelihood of the observed distribution of each of the specific haplotypes. In this study the empirical p-values presented are based on up to 100,000,000 permutations. In the analyses performed the controls were compared to individuals with BPD, to individuals with SZ as well as to these groups combined. P-values less than 0.05 are referred to as significant. No correction for multiple testing was performed. Hardy Weinberg equilibrium for the individual SNPs was analyzed using χ².

[0374] Analyzes of linkage disequilibrium (LD) was performed using the program Ldmax from the GOLD software package (http://www.sph.umich.edu/csg/abecasis/GOLD/index.html).^{50,51}

### In Silico Analyses

[0375] MatInspector (www.genomatix.de)^{52,53} was used to assess and analyze the impact of promoter SNPs on potential binding sites for transcription factors. The possible effect of intragenic SNPs on splicing was investigated using the programs ESEfinder release 2.0 (http://rulai.cshl.edu/tools/ESE),⁵²⁻⁵⁴ RESCUE-ESE Web Server, (http://genes.mit.edu/burgelab/rescue-ese),⁵⁵ FAS-ESS web server (http://genes.mit.edu/fas-ess/),⁵⁶ ExonScan Web Server (http://genes.mit.edu/exonscan/),⁵⁶ and NNSPLICE (http://www. fruitfly.org/seq_tools/splice).⁵⁷

[0376] The effect of 3′ UTR SNPs on microRNA binding sites were analyzed using the miRBase Targets Pre-release Version 1.0 (http://microrna.sanger.ac.uk/targets/v1/), a web resource provided by the Wellcome Trust Sanger Institute containing computationally predicted targets for microRNAs across a number of species.⁵⁸

### Results

### SNPs

[0377] In search for susceptibility variants sequencing of the coding region, intron-exon boundaries, and the promoter region (500 bp upstream to the transcription initiation site) of the gene PIPPIN was carried out in five individuals with SZ, four with BPD and one control person from the Faeroese sample. We identified a single polymorphism in the promoter region (rs6002408). In addition the dbSNP database (http://www.ncbi.nlm.nih.gov/SNP) and the genome browser of University of California Santa Cruz (http://www.genome.ucsc.edu/) were used for selection of 11 SNPs in EP300, PIPPIN, NHP2L1, and SERHL (table 1). A total of 12 SNPs were analyzed. All SNPs were found to be in Hardy-Weinberg equilibrium in all samples.

[0378] Rs5758252 and rs1802521 were monomorphic and excluded from statistical analyses. Method problems, and uncertain genotyping caused rs2294976, rs60002408, rs132806, and rs5758405 to be excluded from the statistical analyses of the Scottish sample, and rs60002408 to be excluded from statistical analysis in the replication samples from Denmark and the UK.

[0379] Association Analysis.

[0380] In the Scottish sample three SNPs showed a significant single marker association; rs20551 (EP300) was associated with BPD (p-value=0.0132), rs926333 (SERHL) was associated with SZ (p-value=0.0131), and rs1006407 (PIPPIN) was associated with SZ and BPD combined (p-value=0.049) (table 2). In the overall haplotype analysis the strongest association was observed when comparing controls to cases combined. 2-, 3-, 4-, and 5-marker haplotypes was associated with both SZ and BPD with the most significant signal centered on rs8779 (NHP2L1). Especially the specific 2-marker haplotype rs1006407-T/rs8779-A, was underrepresented in cases (0.7%) compared to controls (5%) yielding a p-value of 4.17×10⁻⁶ (table 3).

[0381] In the UK sample rs8779 showed significant association with BPD, SZ, and cases combined (p-values of 0.0044, 0.0149, and 0.0024 respectively). Rs926333 was found to be associated with BPD and cases combined (table 4). In the overall haplotype analysis the association was almost entirely found in BPD centered on the 2-marker haplotype rs1006407-rs8779 and 3-, 4-, and 5-marker centromeric extensions of this haplotype (table 4). Analysis of the individual haplotypes revealed that rs1006407-T/rs8779-A (the same haplotype as original was identified in the Scottish sample), had a frequency of 2.8% in the controls, and a frequency of 13.6% in cases suffering from BPD (table 5) (which is skewed in the opposite direction compared to the Scottish sample) yielding a haplotype specific p-value of 1.36×10⁻⁹. The haplotype rs1006407-T/rs8779-G in contrary was underrepresented in cases suffering from BPD (68.7%) compared to controls (80.2%) producing a haplotype specific p-value of 1.93×10⁻⁵.

[0382] Additionally two modest overall significant results were found involving the SNPs in NHP2L1 and in SERHL (table 4), with several individual haplotypes generating the association.

[0383] In the Danish sample rs881542 (SERHL) showed single marker association with SZ, BPD and cases combined whereas rs5758405 (NHP2L1) and rs1006407 was found to be associated with BPD and cases combined. Rs8779 showed a significant association with BPD (table 6).

[0384] The haplotype analysis produced the most significant associations when comparing BPD to controls and less though still significant association when comparing SZ to controls. The strongest signal was centered on 2-, to 5-marker haplotypes associated with BPD, SZ, as well as theses disorders combined, involving primarily the three SNPs rs5758405 (NHP2L1), rs881542 and rs926333 (both SERHL). The specific haplotypes causing this association were rs5758405-A/rs881542-C/rs926333-G (and derivates of this haplotype), which was overrepresented in cases (72%) compared to controls (56%), and rs881542-G/rs926333-G (and derivates of this haplotype), which was overrepresented in controls (23%) compared to cases (13%), yielding haplotype specific p-values of 1.49×10⁻⁴ and 1.2×10⁻³ respectively.

[0385] As in the samples from Scotland and UK the overall 2-marker haplotype rs1006407/rs8779 showed association with BPD and SZ. The specific haplotype rs1006407-T/rs8779-A was in this sample significantly overrepresented in SZ (12.8%) compared to controls (2.12%) (p-value=7.82×10⁻⁴) whereas the haplotype was not found in BPD at all (table 7).

[0386] Combining the original case-control sample from Scotland with the replication samples from Denmark and UK produced overall and haplotype specific associations similar to the signals found in the samples separately. Furthermore a number of haplotypes were found to have a consistently skewed frequency across all three samples (table 8).

### In Silico Analysis

[0387] Using Matinspector (www.genomatix.de) the SERHL promoter SNP rs881542 (table 1) was analyzed for effects on potential binding sites for transcription factors. The program suggested that the rare G-allele introduced new binding sites for the transcription factors Collagen krox protein (zink finger protein zfp67) shown to be involved in regulation of type 1-, and 2 collagen gene transcription 59,60 and Myc associated zing finger protein (MAZ), a transcription factor closely related to SP1 and involved in regulation of numerous genes.⁶¹

[0388] The non-synonymous EP300 SNP rs20551 located in exon 15 and the SERHL SNP rs926333 located in exon 2 were analyzed for effects on exon splicing enhancers (ESE), exon splice silencers (ESS) and donor and acceptor sites. FAS-ESS identified a site for a potential exon splice silencer introduced by the G-allele of rs20551 but analysis of the splice sites revealed strong donor and acceptor site suggesting a very limited potential effect on splicing of this site. The ExonScan analysis of rs20551 confirmed this by finding no other potential splicing variation of exon 15 and hardly any difference in the summed splicing score introduced by the G-allele of rs20551.

[0389] According to NNSPLICE the NHP2L1 intron SNP rs5758405 had no effect on potential donor or acceptor sites in intron 1. Likewise the EP300 intron SNPs rs2294976 (EP300) and rs2076578 (EP300) had no effect on splicing.

[0390] MiRBase Targets Pre-release Version 1.0 identified no changes in miRNA binding sites in the 3′UTR sequences of PIPPIN or NHP2L1.

### Linkage Disequilibrium

[0391] In general the same LD pattern was observed in cases and in controls in the three different samples (table 9). A high degree of LD was observed between SNPs located in EP300, PIPPIN, and NHP2L1. A limited level of LD was observed between SNPs located in SERHL and SNPs in EP300, PIPPIN and NHP2L1 indicating that SERHL could be located in another haplotype block. The results was confirmed by data retrieved from The International HapMap Project (http://www.hapmap.org/) in which EP300, PIPPIN and NHP2L1 in the CEU population were located in a 780 kb loosely defined haplotype block, while SERHL was located in a clearly distinctive more telomeric block.

### REFERENCES

[0392] 1. 22, S.C.L.G.f.C. A transmission disequilibrium and linkage analysis of D22S278 marker alleles in 574 families: further support for a susceptibility locus for schizophrenia at 22q12. Schizophrenia Collaborative Linkage Group for Chromosome 22. Schizophr Res 32, 115-21 (1998).
[0393] 2. Aamantidis A, Thomas E, Foidart A, Tyhon A, Coumans B, Minet A, Tirelli E, Seutin V, Grisar T, Lakaye B. 2005. Disrupting the melanin-concentrating hormone receptor 1 in mice leads to cognitive deficits and alterations of NMDA receptor function. Eur J Neurosci 21(10):2837-44.
[0394] 3. Abecasis, G. R. & Cookson, W. O. GOLD—graphical overview of linkage disequilibrium. Bioinformatics 16, 182-3 (2000).
[0395] 4. Als T D, Dahl H A, Flint T J, Wang A G, Vang M, Mors O, Kruse T A and Ewald H (2004) Possible evidence for a common risk locus for bipolar affective disorder and schizophrenia on chromosome 4p16 in patients from the Faroe Islands. Mol Psychiatry, 9, 93-8.
[0396] 5. An, W.; Kim, J.; Roeder, R. G. Ordered cooperative functions of PRMT1, p300, and CARM1 in transcriptional activation by p53. Cell 117: 735-748, 2004.
[0397] 6. Arany, Z.; Newsome, D.; Oldread, E.; Livingston, D. M.; Eckner, R. A family of transcriptional adaptor proteins targeted by the E1A oncoprotein. Nature 374: 81-84, 1995.
[0398] 7. Arany, Z.; Sellers, W. R.; Livingston, D. M.; Eckner, R. E1A-associated p300 and CREB-associated CBP belong to a conserved family of coactivators. (Letter) Cell 77: 799-800, 1994.
[0399] 8. Asherson P, Mant R, Williams N, Cardno A, Jones L, Murphy K, Collier D A, Nanko S, Craddock N, Morris S et al. (1998) A study of chromosome 4p markers and dopamine D5 receptor gene in schizophrenia and bipolar disorder. Mol Psychiatry, 3, 310-20.
[0400] 9. Association, A.P. Diagnostic and statistical manual of mental disorders., (American Psychiatric Association, Washington, 1994).
[0401] 10 Auga J. 2004. The role of Zic genes in neural development. Mol Cell Neurosci 26(2):205-21.
[0402] 11 Badner J. A., and E. S. Gershon, 2002, Meta-analysis of whole-genome linkage scans of bipolar disorder and schizophrenia: Mol Psychiatry, v. 7, p. 405-11.
[0403] 12 Berrettini W (2003) Evidence for shared susceptibility in bipolar disorder and schizophrenia. Am J Med Genet C Semin Med Genet, 123, 59-64.
[0404] 13 Berrettini W. H., 2000, Are schizophrenic and bipolar disorders related? A review of family and molecular studies: Biol Psychiatry, v. 48, p. 531-8.
[0405] 14 Bjarkam C R, Pedersen M and Sorensen J C (2001) New strategies for embedding, orientation and sectioning of small brain specimens enable direct correlation to MR-images, brain atlases, or use of unbiased stereology. J Neurosci Methods, 108, 153-9.
[0406] 15 Blackwood D H, He L, Morris S W, McLean A, Whitton C, Thomson M, Walker M T, Woodburn K, Sharp C M, Wright A F et al. (1996) A locus for bipolar affective disorder on chromosome 4p. Nat Genet, 12, 427-30.
[0407] 16 Blouin, J. L. et al. Schizophrenia susceptibility loci on chromosomes 13q32 and 8p21. Nat Genet. 20, 70-3 (1998).
[0408] 17 Borglum A D, Hampson M, Kjeldsen T E, Muir W, Murray V, Ewald H, Mors O, Blackwood D and Kruse T A (2001) Dopa decarboxylase genotypes may influence age at onset of schizophrenia. Mol Psychiatry, 6, 712-7.
[0409] 18 Borglum A D, Kirov G, Craddock N, Mors O, Muir W, Murray V, McKee I, Collier D A, Ewald H, Owen M J et al. (2003) Possible parent-of-origin effect of Dopa decarboxylase in susceptibility to bipolar affective disorder. Am J Med Genet B Neuropsychiatr Genet, 117, 18-22.
[0410] 19 Borowsky, B.; Durkin, M. M.; Ogozalek, K.; Marzabadi, M. R.; DeLeon, J.; Heurich, R.; Lichtblau, H.; Shaposhnik, Z.; Daniewska, I.; Blackburn, T. P.; Branchek, T. A.; Gerald, C.; Vaysse, P. J.; Forray, C. Antidepressant, anxiolytic and anorectic effects of a melanin-concentrating hormone-1 receptor antagonist. Nature Med. 8: 825-830, 2002.
[0411] 20 Bttencourt J C, Frigo L, Rissman R A, Casatti C A, Nahon J L, Bauer J A. 1998. The distribution of melanin-concentrating hormone in the monkey brain (Cebus apella). Brain Res 804(1):140-3.
[0412] 21 Bttencourt J C, Presse F, Arias C, Peto C, Vaughan J, Nahon J L, Vale W, Sawchenko P E. 1992. The melanin-concentrating hormone system of the rat brain: an immuno- and hybridization histochemical characterization. J Comp Neurol 319(2):218-45.
[0413] 22 Cartegni L, Wang J, Zhu Z, Zhang M Q and Krainer A R (2003) ESEfinder: A web resource to identify exonic splicing enhancers. Nucleic Acids Res, 31, 3568-71.
[0414] 23 Castella P, Wagner J A and Caudy M (1999) Regulation of hippocampal neuronal differentiation by the basic helix-loop-helix transcription factors HES-1 and MASH-1. J Neurosci Res, 56, 229-40.
[0415] 23 Castiglia D, Scaturro M, Nastasi T, Cestelli A, Di Liegro I. PIPPin, a putative RNA-binding protein specifically expressed in the rat brain. Biochem Biophys Res Commun. 1996 Jan. 5; 218(1):390-4.
[0416] 25 Chaki S, Funakoshi T, Hirota-Okuno S, Nishiguchi M, Shimazaki T, Iijima M, Grottick A J, Kanuma K, Omodera K, Sekiguchi Y and others. 2005. Anxiolytic- and antidepressant-like profile of ATC0065 and ATC0175: nonpeptidic and orally active melanin-concentrating hormone receptor 1 antagonists. J Pharmacol Exp Ther 313(2):831-9.
[0417] 26 Chambers, J.; Ames, R. S.; Bergsma, D.; Muir, A.; Fitzgerald, L. R.; Hervieu, G.; Dytko, G. M.; Foley, J. J.; Martin, J.; Liu, W.-S.; Park, J.; Ellis, C.; Ganguly, S.; Konchar, S.; Cluderay, J.; Leslie, R.; Wilson, S.; Sarau, H. M. Melanin-concentrating hormone is the cognate-ligand for the orphan G-protein-coupled receptor SLC-1. Nature 400: 261-265, 1999.
[0418] 27 Chang, M. S. et al. HRad17 colocalizes with NHP2L1 in the nucleolus and redistributes after UV irradiation. J Biol Chem 274, 36544-9 (1999).
[0419] 28 Chen S, Smith D F. 1998. Hop as an adaptor in the heat shock protein 70 (Hsp70) and hsp90 chaperone machinery. J Biol Chem 273(52):35194-200.
[0420] 29 Cojocaru, V., Nottrott, S., Klement, R. & Jovin, T. M. The snRNP 15.5K protein folds its cognate K-turn RNA: a combined theoretical and biochemical study. Rna 11, 197-209 (2005).
[0421] 30 Coon H, Jensen S, Holik J, Hoff M, Myles-Worsley M, Reimherr F, Wender P, Waldo M, Freedman R, Leppert M et al. (1994) Genomic scan for genes predisposing to schizophrenia. Am J Med Genet, 54, 59-71.
[0422] 31 Coon, H. et al. Analysis of chromosome 22 markers in nine schizophrenia pedigrees. Am J Med Genet. 54, 72-9 (1994).
[0423] 32 Corfas G, Roy K and Buxbaum J D (2004) Neuregulin 1-erbB signaling and the molecular/cellular basis of schizophrenia. Nat Neurosci, 7, 575-80.
[0424] 33 Craddock N, O'Donovan M C and Owen M J (2005) The genetics of schizophrenia and bipolar disorder: dissecting psychosis. J Med Genet, 42, 193-204.
[0425] 34 Craddock N, O'Donovan M C and Owen M J (2006) Genes for schizophrenia and bipolar disorder? Implications for psychiatric nosology. Schizophr Bull, 32, 9-16.
[0426] 35 DeLisi, L. E. et al. A genome-wide scan for linkage to chromosomal regions in 382 sibling pairs with schizophrenia or schizoaffective disorder. Am J Psychiatry 159, 803-12 (2002).
[0427] 36 Detera-Wadleigh, S. D. et al. A high-density genome scan detects evidence for a bipolar-disorder susceptibility locus on 13q32 and other potential loci on 1q32 and 18p11.2. Proc Natl Acad Sci USA 96, 5604-9 (1999).
[0428] 37 Devaney J M, Donarum E A, Brown K M, Meyer J, Stober G, Lesch K P, Nestadt G, Stephan D A and Pulver A E (2002) No missense mutation of WKL1 in a subgroup of probands with schizophrenia. Mol Psychiatry, 7, 419-23.
[0429] 38 Devlin B, Roeder K. 1999. Genomic control for association studies. Biometrics 55(4):997-1004.
[0430] 39 Eckner, R.; Ewen, M. E.; Newsome, D.; Gerdes, M.; DeCaprio, J. A.; Lawrence, J. B.; Livingston, D. M. Molecular cloning and functional analysis of the adenovirus E1A-associated 300-kD protein (p300) reveals a protein with properties of a transcriptional adaptor. Genes Dev. 15: 869-884, 1994.
[0431] 40 Edenberg, H. J. et al. Initial genomic scan of the NIMH genetics initiative bipolar pedigrees: chromosomes 3, 5, 15, 16, 17, and 22. Am J Med Genet. 74, 238-46 (1997).
[0432] 41 Enright, A. J. et al. MicroRNA targets in Drosophila. Genome Biol 5, R1 (2003).
[0433] 42 Etchegaray, J.-P.; Lee, C.; Wade, P. A.; Reppert, S. M. Rhythmic histone acetylation underlies transcription in the mammalian circadian clock. Nature 421: 177-182, 2003.
[0434] 43 Excoffier L and Slatkin M (1995) Maximum-likelihood estimation of molecular haplotype frequencies in a diploid population. Mol Biol Evol, 12, 921-7.
[0435] 44Fairbrother W G, Yeh R F, Sharp P A and Burge C B (2002) Predictive identification of exonic splicing enhancers in human genes. Science, 297, 1007-13.
[0436] 45 Galera, P., Musso, M., Ducy, P. & Karsenty, G. c-Krox, a transcriptional regulator of type I collagen gene expression, is preferentially expressed in skin. Proc Natl Acad Sci USA 91, 9372-6 (1994).
[0437] 46 Gayther, S. A.; Batley, S. J.; Linger, L.; Bannister, A.; Thorpe, K.; Chin, S.-F.; Daigo, Y.; Russell, P.; Wilson, A.; Sowter, H. M.; Delhanty, J. D. A.; Ponder, B. A. J.; Kouzarides, T.; Caldas, C. Mutations truncating the EP300 acetylase in human cancers. Nature Genet. 24: 300-303, 2000.
[0438] 47 Ghayor, C. et al. Regulation of human COL2A1 gene expression in chondrocytes. Identification of C-Krox-responsive elements and modulation by phenotype alteration. J Biol Chem 275, 27421-38 (2000).
[0439] 48 Gill M., H. Vallada, D. Collier, P. Sham, P. Holmans, R. Murray, P. McGuffin, S, Nanko, M. Owen, S. Antonarakis, D. Housman, H. Kazazian, G. Nestadt, A. E. Pulver, R. E. Straub, C. J. MacLean, D. Walsh, K. S. Kendler, L. DeLisi, M. Polymeropoulos, H. Coon, W. Byerley, R. Lofthouse, E. Gershon, C. M. Read, and et al., 1996, A combined analysis of D22S278 marker alleles in affected sib-pairs: support for a susceptibility locus for schizophrenia at chromosome 22q12. Schizophrenia Collaborative Linkage Group (Chromosome 22): Am J Med Genet, v. 67, p. 40-5.
[0440] 49 Grossman, S. R.; Deato, M. E.; Brignone, C.; Chan, H. M.; Kung, A. L.; Tagami, H.; Nakatani, Y.; Livingston, D. M. Polyubiquitination of p53 by a ubiquitin ligase activity of p300. Science 300: 342-344, 2003.
[0441] 50 Hamshere, M. L. et al. Genomewide linkage scan in schizoaffective disorder: significant evidence for linkage at 1q42 close to DISC1, and suggestive evidence at 22q11 and 19p13. Arch Gen Psychiatry 62, 1081-8 (2005).
[0442] 51 Hardy O J, Vekemans X. 2002. SPAGEDi: a versatile computer program to analyse spatial genetic structure at the individual or population levels. Molecular Ecology Notes 2:618-620
[0443] 52 Harrison P J and Weinberger D R (2005) Schizophrenia genes, gene expression, and neuropathology: on the matter of their convergence. Mol Psychiatry, 10, 40-68.
[0444] 53 Hasan, S.; Hassa, P. O.; Imhof, R.; Hottiger, M. O. Transcription coactivator p300 binds PCNA and may have a role in DNA repair synthesis. Nature 410: 387-391, 2001.
[0445] 54 Hasan, S.; Stucki, M.; Hassa, P. O.; Imhof, R.; Gehrig, P.; Hunziker, P.; Hubscher, U.; Hottiger, M. O. Regulation of human flap endonuclease-1 activity by acetylation through the transcriptional coactivator p300. Molec. Cell 7: 1221-1231, 2001.
[0446] 55 Ida, K.; Kitabayashi, I.; Taki, T.; Taniwaki, M.; Noro, K.; Yamamoto, M.; Ohki, M.; Hayashi, Y. Adenoviral E1A-associated protein p300 is involved in acute myeloid leukemia with t(11; 22) (q23; q13). Blood 90: 4699-4704, 1997.
[0447] 56 Ishibashi M (2004) Molecular mechanisms for morphogenesis of the central nervous system in mammals. Anat Sci Int, 79, 226-34.
[0448] 57 Jensen T G, Andresen B S, Bross P, Jensen U B, Holme E, Kolvraa S, Gregersen N and Bolund L (1992) Expression of wild-type and mutant medium-chain acyl-CoA dehydrogenase (MCAD) cDNA in eucaryotic cells. Biochim Biophys Acta, 1180, 65-72.
[0449] 58 Jorgensen T H, Borglum A D, Mors O, Wang A G, Pinaud M, Flint T J, Dahl H A, Vang M, Kruse T A and Ewald H (2002) Search for common haplotypes on chromosome 22q in patients with schizophrenia or bipolar disorder from the Faroe Islands. Am J Med Genet, 114, 245-52.
[0450] 59 Jorgensen T H, Degn B, Wang A G, Vang M, Gurling H, Kalsi G, McQuillin A, Kruse T A, Mors O, Ewald H. 2002b. Linkage disequilibrium and demographic history of the isolated population of the Faroe Islands. Eur J Hum Genet 10(6):381-7.
[0451] 60 Kaganovich M, Peretz A, Ritsner M, Bening Abu-Shach U, Attali B and Navon R (2004) Is the WKL1 gene associated with schizophrenia? Am J Med Genet B Neuropsychiatr Genet, 125, 31-7.
[0452] 61 Kasper, L. H.; Boussouar, F.; Ney, P. A.; Jackson, C. W.; Rehg, J.; van Deursen, J. M.; Brindle, P. K. A transcription-factor-binding surface of coactivator p300 is required for haematopoiesis. Nature 419: 738-743, 2002.
[0453] 62 Kelsoe J. R., M. A. Spence, E. Loetscher, M. Foguet, A. D. Sadovnick, R. A. Remick, P. Flodman, J. Khristich, Z. Mroczkowski-Parker, J. L. Brown, D. Masser, S. Ungerleider, M. H. Rapaport, W. L. Wishart, and H. Luebbert, 2001, A genome survey indicates a possible susceptibility locus for bipolar disorder on chromosome 22: Proc Natl Acad Sci USA, v. 98, p. 585-90.
[0454] 63 Kmoch S, Hartmannova H, Stiburkova B, Krijt J, Zikanova M, Sebesta I. 2000. Human adenylosuccinate lyase (ADSL), cloning and characterization of full-length cDNA and its isoform, gene structure and molecular basis for ADSL deficiency in six patients. Hum Mol Genet. 9(10):1501-13.
[0455] 64 Kolakowski, L. F., Jr.; Jung, B. P.; Nguyen, T.; Johnson, M. P.; Lynch, K. R.; Cheng, R.; Heng, H. H. Q.; George, S. R.; O'Dowd, B. F. Characterization of a human gene related to genes encoding somatostatin receptors. FEBS Lett. 398: 253-258, 1996.
[0456] 65 Kolodrubetz, D.; Burgum, A. Sequence and genetic analysis of NHP2: a moderately abundant high mobility group-like nuclear protein with an essential function in Saccharomyces cerevisiae. Yeast 7: 79-90, 1991.
[0457] Lachman, H. M. et al. Linkage studies suggest a possible locus for bipolar disorder near the velo-cardio-facial syndrome region on chromosome 22. Am J Med Genet 74, 121-8 (1997).
[0458] 67 Ladurner A G, Inouye C, Jain R and Tjian R (2003) Bromodomains mediate an acetyl-histone encoded antisilencing function at heterochromatin boundaries. Mol Cell, 11, 365-76.
[0459] 68 Lakaye, B.; Minet, A.; Zorzi, W.; Grisar, T. Cloning of the rat brain cDNA encoding for the SLC-1 G protein-coupled receptor reveals the presence of an intron in the gene. Biochim. Biophys. Acta 1401: 216-220, 1998.
[0460] 69 Lewis C M, Levinson D F, Wise L H, DeLisi L E, Straub R E, Hovatta I, Williams N M, Schwab S G, Pulver A E, Faraone S V et al. (2003) Genome scan meta-analysis of schizophrenia and bipolar disorder, part II: Schizophrenia. Am J Hum Genet, 73, 34-48.
[0461] 70 Li T, Ma X, Sham P C, Sun X, Hu X, Wang Q, Meng H, Deng W, Liu X, Murray R M, Collier D A. Evidence for association between novel polymorphisms in the PRODH gene and schizophrenia in a Chinese population. Am J Med Genet B Neuropsychiatr Genet. 129B:13-5, 2004
[0462] 71 Liang, S. G. et al. A linkage disequilibrium study of bipolar disorder and microsatellite markers on 22q13. Psychiatr Genet 12, 231-5 (2002).
[0463] 72 Lin, C. H.; Hare, B. J.; Wagner, G.; Harrison, S. C.; Maniatis, T.; Fraenkel, E.: A small domain of CBP/p300 binds diverse proteins: solution structure and functional studies. Molec. Cell 8: 581-590, 2001.
[0464] 73 Livak K J and Schmittgen T D (2001) Analysis of relative gene expression data using real-time quantitative PCR and the 2(−Delta Delta C(T)) Method. Methods, 25, 402-8.
[0465] 74 Lukasik S M, Cierpicki T, Borloz M, Grembecka J, Everett A and Bushweller J H (2006) High resolution structure of the HDGF PWWP domain: a potential DNA binding domain. Protein Sci, 15, 314-23.
[0466] 75 Manning, E. T., Ikehara, T., Ito, T., Kadonaga, J. T. & Kraus, W. L. p300 forms a stable, template-committed complex with chromatin: role for the bromodomain. Mol Cell Biol 21, 3876-87 (2001).
[0467] 76 Marie S, Cuppens H, Heuterspreute M, Jaspers M, Tola E Z, Gu X X, Legius E, Vincent M F, Jaeken J, Cassiman J J and others. 1999. Mutation analysis in adenylosuccinate lyase deficiency: eight novel mutations in the re-evaluated full ADSL coding sequence. Hum Mutat 13(3): 197-202.
[0468] 77 Marsh, D. J.; Weingarth, D. T.; Novi, D. E.; Chen, H. Y.; Trumbauer, M. E.; Chen, A. S.; Guan, X.-M.; Jiang, M. M.; Feng, Y.; Camacho, R. E.; Shen, Z.; Frazier, E. G.; et al. Melanin-concentrating hormone 1 receptor-deficient mice are lean, hyperactive, and hyperphagic and have altered metabolism. Proc. Nat. Acad. Sci. 99: 3240-3245, 2002.
[0469] 78 McCullagh, P.; Chaplin, T.; Meerabux, J.; Grenzelias, D.; Lillington, D.; Poulsom, R.; Gregorini, A.; Saha, V.; Young, B. D. The cloning, mapping and expression of a novel gene, BRL, related to the AF10 leukaemia gene. Oncogene 18: 7442-7452, 1999.
[0470] 79 McGuffin P., M. J. Owen, and A. E. Farmer, 1995, Genetic basis of schizophrenia: Lancet, v. 346, p. 678-82.
[0471] 80 Meyer J, Huberth A, Ortega G, Syagailo Y V, Jatzke S, Mossner R, Strom T M, Ulzheimer-Teuber I, Stober G, Schmitt A et al. (2001) A missense mutation in a novel gene encoding a putative cation channel is associated with catatonic schizophrenia in a large pedigree. Mol Psychiatry, 6, 302-6.
[0472] 81 Moises, H. W. et al. Potential linkage disequilibrium between schizophrenia and locus D22S278 on the long arm of chromosome 22. Am J Med Genet 60, 465-7 (1995).
[0473] 82 Mowry B J, Holmans P A, Pulver A E, Gejman P V, Riley B, Williams N M, Laurent C, Schwab S G, Wildenauer D B, Bauche S et al. (2004) Multicenter linkage study of schizophrenia loci on chromosome 22q. Mol Psychiatry, 9, 784-95.
[0474] 83 Muraoka, M.; Konishi, M.; Kikuchi-Yanoshita, R.; Tanaka, K.; Shitara, N.; Chong, J.-M.; Iwama, T.; Miyaki, M. p300 gene alterations in colorectal and gastric carcinomas. Oncogene 12: 1565-1569, 1996.
[0475] 84 Myles-Worsley, M. et al. Linkage of a composite inhibitory phenotype to a chromosome 22q locus in eight Utah families. Am J Med Genet 88, 544-50 (1999).
[0476] 85 Nakashima, K.; Yanagisawa, M.; Arakawa, H.; Kimura, N.; Hisatsune, T.; Kawabata, M.; Miyazono, K.; Taga, T. Synergistic signaling in fetal brain by STAT3-Smad1 complex bridged by p300. Science 284: 479-482, 1999.
[0477] 86 Nastasi T, Muzi P, Beccari S, Bellafiore M, Dolo V, Bologna M, Cestelli A, Di Liegro I. Specific neurons of brain cortex and cerebellum are PIPPin positive. Neuroreport. 2000 Jul. 14; 11(10):2233-6.
[0478] 87 Nastasi T, Scaturro M, Bellafiore M, Raimondi L, Beccari S, Cestelli A, di Liegro I. PIPPin is a brain-specific protein that contains a cold-shock domain and binds specifically to H1 degrees and H3.3 mRNAs. J Biol Chem. 1999 Aug. 20; 274(34):24087-93
[0479] 88 Pissios P, Trombly D J, Tzameli I, Maratos-Flier E. 2003. Melanin-concentrating hormone receptor 1 activates extracellular signal-regulated kinase and synergizes with G(s)-coupled pathways. Endocrinology 144(8):3514-23.
[0480] 89 Plomann, M.; Lange, R.; Vopper, G.; Cremer, H.; Heinlein, U. A. O.; Scheff, S.; Baldwin, S. A.; Leitges, M.; Cramer, M.; Paulsson, M.; Barthels, D. PACSIN, a brain protein that is upregulated upon differentiation into neuronal cells. Europ. J. Biochem. 256: 201-211, 1998.
[0481] 90 Polymeropoulos M H, Coon H, Byerley W, Gershon E S, Goldin L, Crow T J, Rubenstein J, Hoff M, Holik J, Smith A M and others. 1994. Search for a schizophrenia susceptibility locus on human chromosome 22. Am J Med Genet. 54(2):93-9.
[0482] 91 Potash J. B., and J. R. DePaulo, Jr., 2000, Searching high and low: a review of the genetics of bipolar disorder: Bipolar Disord, v. 2, p. 8-26.
[0483] 92 Potash J. B., P. P. Zandi, V. L. Willour, T. H. Lan, Y. Huo, D. Avramopoulos, Y. Y. Shugart, D. F. MacKinnon, S. G. Simpson, F. J. McMahon, J. R. DePaulo, Jr., and M. G. McInnis, 2003b, Suggestive linkage to chromosomal regions 13q31 and 22q12 in families with psychotic bipolar disorder: Am J Psychiatry, v. 160, p. 680-6.
[0484] 93 Potash J. B., Y. F. Chiu, D. F. MacKinnon, E. B. Miller, S. G. Simpson, F. J. McMahon, M. G. McInnis, and J. R. DePaulo, Jr., 2003a, Familial aggregation of psychotic symptoms in a replication set of 69 bipolar disorder pedigrees: Am J Med Genet, v. 116B, p. 90-7.
[0485] 94 Potash J B, Willour V L, Chiu Y F, Simpson S G, MacKinnon D F, Pearlson G D, DePaulo J R, Jr., McInnis M G. 2001. The familial aggregation of psychotic symptoms in bipolar disorder pedigrees. Am J Psychiatry 158(8):1258-64.
[0486] 95 Prapapanich V, Chen S, Nair S C, Rimerman R A, Smith D F. 1996. Molecular cloning of human p48, a transient component of progesterone receptor complexes and an Hsp70-binding protein. Mol Endocrinol 10(4):420-31.
[0487] 96 Pulver A. E., M. Karayiorgou, P. S. Wolyniec, V. K. Lasseter, L. Kasch, G. Nestadt, S. Antonarakis, D. Housman, H. H. Kazazian, D. Meyers, and et al., 1994, Sequential strategy to identify a susceptibility gene for schizophrenia: report of potential linkage on chromosome 22q12-q13.1: Part 1: Am J Med Genet, v. 54, p. 36-43.
[0488] 97 Puri, V. et al. Failure to Confirm Allelic Association Between Markers at the CAPON Gene Locus and Schizophrenia in a British Sample. Biol Psychiatry (2005).
[0489] 98 Qu D, Ludwig D S, Gammeltoft S, Piper M, Pelleymounter M A, Cullen M J, Mathes W F, Przypek R, Kanarek R, Maratos-Flier E. 1996. A role for melanin-concentrating hormone in the central regulation of feeding behaviour. Nature 380(6571):243-7.
[0490] 99 Quandt K, Frech K, Karas H, Wingender E and Werner T (1995) MatInd and MatInspector: new fast and versatile tools for detection of consensus matches in nucleotide sequence data. Nucleic Acids Res, 23, 4878-84.
[0491] 10 Queller D C, Goodnight K F. 1989. Estimating Relatedness Using Genetic-Markers. Evolution 43(2):258-275.
[0492] 10 Ragvin A, Valvatne H, Erdal S, Arskog V, Tufteland K R, Breen K, A M O Y, Eberharter A, Gibson T J, Becker P B et al. (2004) Nucleosome binding by the bromodomain and PHD finger of the transcriptional cofactor p300. J Mol Biol, 337, 773-88.
[0493] 10 Rapoport J L, Addington A M, Frangou S and Psych M R (2005) The neurodevelopmental model of schizophrenia: update 2005. Mol Psychiatry, 10, 434-49.
[0494] 10 Reese M G, Eeckman F H, Kulp D and Haussler D (1997) Improved splice site detection in Genie. J Comput Biol, 4, 311-23.
[0495] 10 Ritter, B.; Modregger, J.; Paulsson, M.; Plomann, M. PACSIN2, a novel member of the PACSIN family of cytoplasmic adapter proteins. FEBS Lett. 454: 356-362, 1999.
[0496] 10 Roelfsema, J. H. et al. Genetic heterogeneity in Rubinstein-Taybi syndrome: mutations in both the CBP and EP300 genes cause disease. Am J Hum Genet 76, 572-80 (2005).
[0497] 10 Rousset F. 2000. Genetic differentiation between individuals. Journal of Evolutionary Biology 13(1):58-62.
[0498] 10 Rubie C, Lichtner P, Gartner J, Siekiera M, Uziel G, Kohlmann B, Kohlschutter A, Meitinger T, Stober G and Bettecken T (2003) Sequence diversity of KIAA0027/MLC1: are megalencephalic leukoencephalopathy and schizophrenia allelic disorders? Hum Mutat, 21, 45-52.
[0499] 10 Sadusky, T. J.; Kemp, T. J.; Simon, M.; Carey, N.; Coulton, G. R.: Identification of Serhl, a new member of the serine hydrolase family induced by passive stretch of skeletal muscle in vivo. Genomics 73: 38-49, 2001. Note: Erratum:Genomics 74:251 only, 2001.
[0500] 10 Sadusky, T. J., Kemp, T. J., Simon, M., Carey, N. & Coulton, G. R. Identification of Serhl, a new member of the serine hydrolase family induced by passive stretch of skeletal muscle in vivo. Genomics 73, 38-49 (2001).
[0501] 11 Saito, H.; Fujiwara, T.; Shin, S.; Okui, K.; Nakamura, Y. Cloning and mapping of a human novel cDNA (NHP2L1) that encodes a protein highly homologous to yeast nuclear protein NHP2. Cytogenet. Cell Genet. 72: 191-193, 1996.
[0502] 11 Saito, Y.; Nothacker, H.-P.; Wang, Z.; Lin, S. H. S.; Leslie, F.; Civelli, O. Molecular characterization of the melanin-concentrating-hormone receptor. Nature 400: 265-269, 1999.
[0503] 11 Saleem Q, Dash D, Gandhi C, Kishore A, Benegal V, Sherrin T, Mukherjee O, Jain S, Brahmachari S K. 2001. Association of CAG repeat loci on chromosome 22 with schizophrenia and bipolar disorder. Mol Psychiatry 6(6):694-700.
[0504] 11 Schmitz G, Heimerl S and Langmann T (2004) Zinc finger protein ZNF202 structure and function in transcriptional control of HDL metabolism. Curr Opin Lipidol, 15, 199-208.
[0505] 11 Schwab S G and Wildenauer D B (1999) Chromosome 22 workshop report. Am J Med Genet, 88, 276-8.
[0506] 11 Segurado, R. et al. Genome scan meta-analysis of schizophrenia and bipolar disorder, part III: Bipolar disorder. Am J Hum Genet 73, 49-62 (2003).
[0507] 11 Sham P C, Curtis D. 1995. Monte Carlo tests for associations between disease and alleles at highly polymorphic loci. Ann Hum Genet. 59 (Pt 1):97-105.
[0508] 11 Sinibaldi L, De Luca A, Bellacchio E, Conti E, Pasini A, Paloscia C, Spalletta G, Caltagirone C, Pizzuti A, Dallapiccola B. Mutations of the Nogo-66 receptor (RTN4R) gene in schizophrenia. Hum Mutat. 24:534-5, 2004.
[0509] 11 Skibinska M, Hauser J, Czerski P M, Leszczynska-Rodziewicz A, Kosmowska M, Kapelski P, Slopien A, Zakrzewska M, Rybakowski J K. Association analysis of brain-derived neurotrophic factor (BDNF) gene Val66Met polymorphism in schizophrenia and bipolar affective disorder. World J Biol Psychiatry 5:215-20, 2004
[0510] 11 Smith D G, Tzavara E T, Shaw J, Luecke S, Wade M, Davis R, Salhoff C, Nomikos G G, Gehlert D R. 2005. Mesolimbic dopamine super-sensitivity in melanin-concentrating hormone-1 receptor-deficient mice. J Neurosci 25(4):914-22.
[0511] 12 Song, J. et al. Transcriptional regulation by zinc-finger proteins Sp1 and MAZ involves interactions with the same cis-elements. Int J Mol Med 11, 547-53 (2003).
[0512] 12 Spitzer R & J, E. The Schedule for Affective Disorders and Schizophrenia, Lifetime Version, 3rd edition., (The Schedule for Affective Disorders and Schizophrenia, Lifetime Version, 3rd edition, New York, 1977).
[0513] 12 Spitzer R, J, E. & E, R. Research Diagnostic Criteria for a selected group of functional disorders, 3rd edition, (New York, N.Y. State Psychiatric Institute, New York, 1978).
[0514] 12 Stober G, Saar K, Ruschendorf F, Meyer J, Nurnberg G, Jatzke S, Franzek E, Reis A, Lesch K P, Wienker T F et al. (2000) Splitting schizophrenia: periodic catatonia-susceptibility locus on chromosome 15q15. Am J Hum Genet, 67, 1201-7.
[0515] 12 Strakowski S M, Delbello M P and Adler C M (2005) The functional neuroanatomy of bipolar disorder: a review of neuroimaging findings. Mol Psychiatry, 10, 105-16.
[0516] 12 Sumoy, L.; Pluvinet, R.; Andreu, N.; Estivill, X.; Escarceller, M. PACSIN 3 is a novel SH3 domain cytoplasmic adapter protein of the pacsin-syndapin-FAP52 gene family. Gene 262: 199-205, 2001.
[0517] 12 Takahashi S, Faraone S V, Lasky-Su J and Tsuang M T (2005) Genome-wide scan of homogeneous subtypes of NIMH genetics initiative schizophrenia families. Psychiatry Res, 133, 111-22.
[0518] 12 Takahashi, K.; Totsune, K.; Murakami, O.; Sone, M.; Satoh, F.; Kitamuro, T.; Noshiro, T.; Hayashi, Y.; Sasano, H.; Shibahara, S. Expression of melanin-concentrating hormone receptor messenger ribonucleic acid in tumor tissues of pheochromocytoma, ganglioneuroblastoma, and neuroblastoma. J. Clin. Endocr. Metab. 86: 369-374, 2001.
[0519] 12 Tini, M.; Benecke, A.; Um, S.-J.; Torchia, J.; Evans, R. M.; Chambon, P. Association of CBP/p300 acetylase and thymine DNA glycosylase links DNA repair and transcription. Molec. Cell 9: 265-277, 2002.
[0520] 12 Vallada H, Curtis D, Sham P C, Murray R M, McGuffin P, Nanko S, Gill M, Owen M, Collier D A. 1995. Chromosome 22 markers demonstrate transmission disequilibrium with schizophrenia. Psychiatr Genet. 5(3): 127-30.
[0521] 13 Verma R, Mukerji M, Grover D, C B R, Das S K, Kubendran S, Jain S and Brahmachari S K (2005) MLC1 gene is associated with schizophrenia and bipolar disorder in Southern India. Biol Psychiatry, 58, 16-22.
[0522] 13 Wang Z, Rolish M E, Yeo G, Tung V, Mawson M and Burge C B (2004) Systematic identification and analysis of exonic splicing silencers. Cell, 119, 831-45.
[0523] 13 Weaver, B. K.; Kumar, K. P.; Reich, N. C. Interferon regulatory factor 3 and CREB-binding protein/p300 are subunits of double-stranded RNA-activated transcription factor DRAF1. Molec. Cell. Biol. 18: 1359-1368, 1998.
[0524] 13 Werner T (2000) Computer-assisted analysis of transcription control regions. Matinspector and other programs. Methods Mol Biol, 132, 337-49.
[0525] 13 WHO. Schedules for Clinical Assessment in Neuropsychiatry, (World Health Organization, Geneva., 1996).
[0526] 13 WHO. The ICD-10 Classification of Mental and Behavioural Disorders. Diagnostic Criteria for Research., (World Health Organization, Geneva., 1993).
[0527] 13 Wildenauer D B, Schwab S G, Maier W and Detera-Wadleigh S D (1999) Do schizophrenia and affective disorder share susceptibility genes? Schizophr Res, 39, 107-11.
[0528] 13 Wing, J. K., Sartorius, N. & and Üstün, T. B. E. Diagnosis and clinical measurement in psychiatry. A reference manual for SCAN, (New York, 1998).
[0529] 13 Xi Z R, Qin W, Yang Y F, He G, Gao S H, Ren M S, Peng Y W, Zhang Z, He L. Transmission disequilibrium analysis of the GSN gene in a cohort of family trios with schizophrenia Neurosci Lett. 372:200-3, 2004
[0530] 13 Yao, T. P.; Oh, S. P.; Fuchs, M.; Zhou, N.-D.; Ch'ng, L.-E.; Newsome, D.; Bronson, R. T.; Li, E.; Livingston, D. M.; Eckner, R. Gene dosage-dependent embryonic development and proliferation defects in mice lacking the transcriptional integrator p300. Cell 93: 361-372, 1998.
[0531] 14 Yeo G and Burge C B (2004) Maximum entropy modeling of short sequence motifs with applications to RNA splicing signals. J Comput Biol, 11, 377-94.
[0532] 14 Zaykin D V, Westfall P H, Young S S, Karnoub M A, Wagner M J and Ehm M G (2002) Testing association of statistically inferred haplotypes with discrete and continuous traits in samples of unrelated individuals. Hum Hered, 53, 79-91.

### Table 1-9

TABLE 1
Genotyped polymorphisms and allele frequencies.

| | | Location | | | MAF SCOTLAND | | | MAF UK | | | MAF DK | | |
|---|---|---|---|---|---|---|---|---|---|---|---|---|---|
| Gene | SNP | (Mb)^{a} | Type of SNP | Alleles^{b} | Controls | BPD | SZ | Controls | BPD | SZ | Controls | BPD | SZ |
| EP300 | rs20551 | 39.872508 | Nonsyn | A/G | 0.38 | 0.30 | 0.38 | 0.30 | 0.32 | 0.29 | 0.28 | 0.23 | 0.27 |
| EP300 | rs2294976 | 39.889208 | Intron | C/A | — | — | — | 0.08 | 0.07 | 0.11 | 0.10 | 0.11 | 0.06 |
| EP300 | rs2076578 | 39.894109 | Intron | C/T | 0.34 | 0.33 | 0.31 | 0.34 | 0.32 | 0.33 | 0.36 | 0.35 | 0.37 |
| EP300 | rs5758252 | 39.898735 | Nonsyn | A/T | 0.00 | 0.00 | 0.00 | — | — | — | — | — | — |
| PIPPIN | rs6002408 | 40.210909 | Promoter | G/A | — | — | — | — | — | — | — | — | — |
| PIPPIN | rs1006407 | 40.296532 | 3′ UTR | T/C | 0.15 | 0.20 | 0.21 | 0.17 | 0.18 | 0.18 | 0.20 | 0.12 | 0.16 |
| NHP2L1 | rs8779 | 40.394776 | 3′ UTR | G/A | 0.21 | 0.18 | 0.19 | 0.19 | 0.26 | 0.26 | 0.22 | 0.12 | 0.34 |
| NHP2L1 | rs132806 | 40.395293 | 3′ UTR | C/T | — | — | — | 0.38 | 0.34 | 0.39 | 0.34 | 0.41 | 0.36 |
| NHP2L1 | rs1802521 | 40.400816 | Nonsyn | T/G | 0.00 | 0.00 | 0.00 | — | — | — | — | — | — |
| NHP2L1 | rs5758405 | 40.400881 | Intron | A/C | — | — | — | 0.18 | 0.19 | 0.20 | 0.21 | 0.13 | 0.16 |
| SERHL | rs881542 | 41.220498 | Promoter | C/G | 0.20 | 0.16 | 0.23 | 0.23 | 0.17 | 0.17 | 0.23 | 0.12 | 0.14 |
| SERHL | rs926333 | 41.222243 | Nonsyn | G/A | 0.11 | 0.14 | 0.20 | 0.01 | 0.02 | 0.03 | 0.05 | 0.09 | 0.03 |

^{a}According to the UCSC Genome Browser, May 2004 assembly (http://www.genome.ucsc.edu)
^{b}Major allele/minor allele on the +strand (http://www.genome.ucsc.edu)
Nonsyn = Nonsynonymous SNP,
MAF = Minor allele frequency,
Syn. = Synonymous SNP
— = no data available for the SNP in this sample.

TABLE 2
Single marker and overall haplotype association analysis in
the case-control sample from Scotland.

| | | Empirical overall p-values^{a} | | | | |
|---|---|---|---|---|---|---|
| Gene | SNP | Single marker | 2-marker | 3-marker | 4-marker | 5-marker |
| BPD + SZ | | | | | | |
| EP300 | rs20551 | 0.1072 | | | | |
| EP300 | rs2076578 | 0.7960 | 0.0158 | | | |
| PIPPIN | rs1006407 | 0.0487 | 0.2046 | 0.0047 | | |
| NHP2L1 | rs8779 | 0.3639 | 4.0 × 10−5 | 0.0016 | 7.5 × 10−5 | |
| SERHL | rs881542 | 0.7099 | 0.5484 | 0.0006 | 0.0020 | 5.9 × 10−5 |
| SERHL | rs926333 | 0.0565 | 0.1627 | 0.2433 | 0.0007 | 0.0109 |
| SZ | | | | | | |
| EP300 | rs20551 | 0.7312 | | | | |
| EP300 | rs2076578 | 0.7049 | 0.6775 | | | |
| PIPPIN | rs1006407 | 0.0899 | 0.3323 | 0.0285 | | |
| NHP2L1 | rs8779 | 0.6759 | 0.0315 | 0.2056 | 0.0957 | |
| SERHL | rs881542 | 0.2902 | 0.7437 | 0.1035 | 0.0922 | 0.0164 |
| SERHL | rs926333 | 0.0131 | 0.0406 | 0.1300 | 0.0122 | 0.0426 |
| BPD | | | | | | |
| EP300 | rs20551 | 0.0132 | | | | |
| EP300 | rs2076578 | 0.9154 | 0.0011 | | | |
| PIPPIN | rs1006407 | 0.0963 | 0.3200 | 0.0016 | | |
| NHP2L1 | rs8779 | 0.3100 | 0.0007 | 0.0176 | 0.0001 | |
| SERHL | rs881542 | 0.1884 | 0.3666 | 0.0063 | 0.0308 | 0.0008 |
| SERHL | rs926333 | 0.3943 | 0.5573 | 0.6804 | 0.0468 | 0.2464 |

^{a}Empirical overall p-values based on 100,000,000 permutations using the HTR program.
P-values <0.05 in bold.

TABLE 3
Distribution selected individual haplotypes in the case-control sample from Scotland.

| Haplotype | | | | | | Haplotype frequency | | | | Empirical p-values^{a} | | |
|---|---|---|---|---|---|---|---|---|---|---|---|---|
| S1 | S3 | S4 | S5 | S8 | S9 | Controls | Cases | BPD | SZ | Combined | BPD | SZ |
| | | T | A | | | 0.0639 | 0.0069 | 0.0038 | 0.0117 | 4.2 × 10−6 | 7.7 × 10−5 | 0.0065 |
| | | T | A | C | | 0.0588 | 0.0032 | <0.001 | 0.0087 | 2.2 × 10−6 | 5.4 × 10−5 | 0.0053 |
| G | T | | | | | <0.001 | 0.0435 | 0.0625 | <0.001 | 0.0024 | 0.0002 | — |
| G | T | T | | | | <0.001 | 0.0382 | 0.0589 | <0.001 | 0.0096 | 0.0005 | — |
| G | C | C | | | | 0.0874 | 0.1606 | 0.1607 | 0.1649 | 0.0039 | 0.0069 | 0.0234 |
| G | C | C | A | | | 0.0927 | 0.1478 | 0.1454 | 0.1555 | 0.0244 | 0.0483 | 0.0519 |
| | | C | A | C | A | 0.0161 | 0.0582 | 0.0475 | 0.0684 | 0.0036 | 0.0444 | 0.0012 |
| | | | | G | A | 0.0073 | 0.0306 | 0.0142 | 0.0549 | 0.0799 | 0.8565 | 0.0071 |

^{a}Empirical overall p-values based on 100,000,000 permutations using the HTR program.
S1 to S9 correspond to SNP: rs20551, rs2294976, rs2076578, rs1006407, rs8779, rs132806, rs5758405, rs881542, rs926333.
— = no p-value value calculated by HTR.

TABLE 4
Single marker and overall haplotype association analysis in
the case-control sample from UK.

| | | Empirical overall p-values^{a} | | | | |
|---|---|---|---|---|---|---|
| Gene | SNP | Single marker | 2-marker | 3-marker | 4-marker | 5-marker |
| BPD + SZ | | | | | | |
| EP300 | rs20551 | 0.9165 | | | | |
| EP300 | rs2294976 | 0.8545 | 0.9540 | | | |
| EP300 | rs2076578 | 0.6831 | 0.9145 | 0.6174 | | |
| PIPPIN | rs1006407 | 0.7295 | 0.9554 | 0.7203 | 0.1967 | |
| NHP2L1 | rs8779 | 0.0024 | 1.0 × 10−6 | 4.6 × 10−5 | 0.0002 | 7.1 × 10−5 |
| NHP2L1 | rs132806 | 0.7380 | 0.0411 | 0.2390 | 0.5064 | 0.4782 |
| NHP2L1 | rs5758405 | 0.5405 | 0.5010 | 0.0218 | 0.0536 | 0.1800 |
| SERHL | rs881542 | 0.1777 | 0.5431 | 0.7254 | 0.1253 | 0.3031 |
| SERHL | rs926333 | 0.0378 | 0.0106 | 0.0825 | 1.0000 | 0.0497 |
| SZ | | | | | | |
| EP300 | rs20551 | 0.5960 | | | | |
| EP300 | rs2294976 | 0.2095 | 0.4662 | | | |
| EP300 | rs2076578 | 0.8892 | 0.5282 | 0.5771 | | |
| PIPPIN | rs1006407 | 0.7103 | 0.8425 | 0.5255 | 0.3510 | |
| NHP2L1 | rs8779 | 0.0149 | 0.0827 | 0.2246 | 0.1940 | 0.1058 |
| NHP2L1 | rs132806 | 0.7226 | 0.0546 | 0.1928 | 0.3120 | 0.4166 |
| NHP2L1 | rs5758405 | 0.4549 | 0.3086 | 0.0459 | 0.0926 | 0.1729 |
| SERHL | rs881542 | 0.3350 | 0.8203 | 0.5076 | 0.1430 | 0.2796 |
| SERHL | rs926333 | 0.3211 | 0.1065 | 0.3183 | 1.0000 | 1.0000 |
| BPD | | | | | | |
| EP300 | rs20551 | 0.5202 | | | | |
| EP300 | rs2294976 | 0.3364 | 0.4251 | | | |
| EP300 | rs2076578 | 0.5903 | 0.4775 | 0.3769 | | |
| PIPPIN | rs1006407 | 0.8198 | 0.9425 | 0.9041 | 0.2412 | |
| NHP2L1 | rs8779 | 0.0044 | 2.4 × 10−11 | 4.7 × 10−9 | 1.3 × 10−8 | 1.1 × 10−8 |
| NHP2L1 | rs132806 | 0.2669 | 0.0038 | 0.0501 | 0.2802 | 0.3318 |
| NHP2L1 | rs5758405 | 0.7431 | 0.4534 | 0.0081 | 0.0144 | 0.1489 |
| SERHL | rs881542 | 0.1882 | 0.3103 | 0.7406 | 0.0852 | 0.1502 |
| SERHL | rs926333 | 0.0155 | 0.0157 | 0.0677 | 0.4050 | 0.0714 |

^{a}Empirical overall p-values based on 100,000,000 permutations using the HTR program.
P-values < 0.05 in bold.

TABLE 5
Distribution of selected individual haplotypes in the case-control sample from UK.

| Haplotype | | | | | | | | | Haplotype frequency | | | | Empirical p-values^{a} | | |
|---|---|---|---|---|---|---|---|---|---|---|---|---|---|---|---|
| S1 | S2 | S3 | S4 | S5 | S6 | S7 | S8 | S9 | Controls | Cases | BPD | SZ | Combined | BPD | SZ |
| A | C | | T | A | | | | | 0.0127 | 0.0718 | 0.0890 | 0.0493 | 7.0 × 10−6 | 6.5 × 10−8 | 0.0061 |
| A | | | T | A | | | | | 0.0133 | 0.0860 | 0.1080 | 0.0614 | 6.2 × 10−7 | 2.1 × 10−9 | 0.0016 |
| | C | | T | A | | | | | 0.0280 | 0.0882 | 0.1153 | 0.0530 | 1.3 × 10−5 | 2.9 × 10−8 | 0.0402 |
| | | C | T | A | | | | | 0.0178 | 0.0601 | 0.0835 | 0.0251 | 6.3 × 10−5 | 2.3 × 10−7 | 0.0650 |
| | | | T | A | | | | | 0.0283 | 0.1026 | 0.1362 | 0.0645 | 1.6 × 10−6 | 1.4 × 10−9 | 0.0137 |
| | | | T | G | | | | | 0.8021 | 0.7197 | 0.6874 | 0.7562 | 0.0005 | 1.9 × 10−5 | 0.0933 |
| | | | | A | T | | | | <0.001 | 0.0267 | 0.0432 | 0.0071 | 0.0088 | 0.0028 | 0.0295 |
| | | | | | | A | C | A | 0.0345 | 0.0108 | 0.0097 | 0.0256 | 0.0068 | 0.0091 | 0.1274 |
| | | | | | | | C | A | 0.0371 | 0.0138 | 0.0106 | 0.0290 | 0.0126 | 0.0077 | 0.2231 |
| | | | | | | | C | G | 0.7687 | 0.8162 | 0.8221 | 0.7862 | 0.0209 | 0.0167 | 0.1399 |

^{a}Empirical overall p-values based on 100,000,000 permutations using the HTR program.
S1 to S9 correspond to SNP: rs20551, rs2294976, rs2076578, rs1006407, rs8779, rs132806, rs5758405, rs881542, rs926333.
— = no value calculated by HTR.

TABLE 6
Single marker and overall haplotype association analysis in the
case-control sample from Denmark.

| | | Empirical overall p-values^{a} | | | | |
|---|---|---|---|---|---|---|
| | | Single | | 3- | 4- | 5- |
| Gene | SNP | marker | 2-marker | marker | marker | marker |
| BPD + SZ | | | | | | |
| EP300 | rs20551 | 0.4570 | | | | |
| EP300 | rs2294976 | 0.6981 | 0.8096 | | | |
| EP300 | rs2076578 | 0.8966 | 0.0599 | 0.8173 | | |
| PIPPIN | rs1006407 | 0.0488 | 0.2144 | 0.0462 | 0.3234 | |
| NHP2L1 | rs8779 | 0.3981 | 0.0797 | 0.2749 | 0.0335 | 0.6045 |
| NHP2L1 | rs132806 | 0.2982 | 0.5614 | 0.1823 | 0.2319 | 0.0437 |
| NHP2L1 | rs5758405 | 0.0453 | 0.1958 | 0.2549 | 0.3628 | 0.2453 |
| SERHL | rs881542 | 0.0005 | 0.0015 | 0.0113 | 0.0461 | 0.0357 |
| SERHL | rs926333 | 0.4982 | 0.0010 | 0.0015 | 0.0217 | 0.0492 |
| SZ | | | | | | |
| EP300 | rs20551 | 0.8907 | | | | |
| EP300 | rs2294976 | 0.1734 | 0.6296 | | | |
| EP300 | rs2076578 | 0.7536 | 0.0582 | 0.6455 | | |
| PIPPIN | rs1006407 | 0.2771 | 0.7759 | 0.4973 | 0.7063 | |
| NHP2L1 | rs8779 | 0.2156 | 0.0065 | 0.0557 | 0.0693 | 0.1549 |
| NHP2L1 | rs132806 | 0.7415 | 0.3238 | 0.0269 | 0.0872 | 0.0905 |
| NHP2L1 | rs5758405 | 0.1829 | 0.4890 | 0.0221 | 0.0621 | 0.1038 |
| SERHL | rs881542 | 0.0086 | 0.0237 | 0.1012 | 0.0322 | 0.0190 |
| SERHL | rs926333 | 0.3166 | 0.0148 | 0.0391 | 0.1481 | 0.0367 |
| BPD | | | | | | |
| EP300 | rs20551 | 0.2597 | | | | |
| EP300 | rs2294976 | 0.6625 | 0.6913 | | | |
| EP300 | rs2076578 | 0.9466 | 0.2034 | 0.6708 | | |
| PIPPIN | rs1006407 | 0.0219 | 0.0463 | 0.0182 | 0.2915 | |
| NHP2L1 | rs8779 | 0.0034 | 0.0078 | 0.0236 | 0.0928 | 0.1696 |
| NHP2L1 | rs132806 | 0.1508 | 0.0251 | 0.0347 | 0.0247 | 0.0123 |
| NHP2L1 | rs5758405 | 0.0302 | 0.0972 | 0.0390 | 0.1322 | 0.0389 |
| SERHL | rs881542 | 0.0008 | 0.0016 | 0.0082 | 0.0248 | 0.0152 |
| SERHL | rs926333 | 0.8064 | 0.0011 | 0.0031 | 0.0144 | 0.0214 |

^{a}Empirical overall p-values based on 100,000,000 permutations using the HTR program.
P-values < 0.05 in bold.

TABLE 7
Distribution of selected individual haplotypes in the case-control sample from Denmark

| Haplotype | | | | | | | | | Haplotype frequency | | | | Empirical p-values^{a} | | |
|---|---|---|---|---|---|---|---|---|---|---|---|---|---|---|---|
| S1 | S2 | S3 | S4 | S5 | S6 | S7 | S8 | S9 | Controls | Cases | BPD | SZ | Combined | BPD | SZ |

| | | | | | | | | | | | | | |
|---|---|---|---|---|---|---|---|---|---|---|---|---|---|
| C | C | | | | | | 0.1735 | 0.1046 | 0.0700 | 0.1333 | 0.0423 | 0.0093 | 0.3027 |
| | T | G | | | | | 0.7736 | 0.8093 | 0.8780 | 0.7195 | 0.3215 | 0.0036 | 0.2499 |
| C | T | G | T | | | | 0.1112 | 0.2130 | 0.2532 | 0.1676 | 0.0583 | 0.0041 | 0.4447 |
| | T | G | T | A | C | | 0.2151 | 0.3232 | 0.3451 | 0.2961 | 0.0303 | 0.0046 | 0.2928 |
| | T | A | | | | | 0.0212 | 0.0554 | <0.001 | 0.1279 | 0.1129 | 0.0214 | 0.0008 |
| | | G | C | A | G | | 0.0950 | 0.0382 | 0.0444 | 0.0304 | 0.0058 | 0.0296 | 0.0078 |
| | | A | C | A | | | <0.001 | 0.0442 | <0.001 | 0.0950 | 0.0530 | — | 0.0006 |
| | | | | A | C | | 0.5902 | 0.7504 | 0.7643 | 0.7345 | 0.0002 | 0.0001 | 0.0045 |
| | | | | A | C | G | 0.5563 | 0.7119 | 0.7227 | 0.6984 | 0.0005 | 0.0008 | 0.0058 |
| | | | | | C | G | 0.7120 | 0.8298 | 0.8349 | 0.8235 | 0.0007 | 0.0030 | 0.0042 |
| | | | | A | G | G | 0.2003 | 0.1017 | 0.0955 | 0.1096 | 0.0037 | 0.0046 | 0.0284 |
| | | | | | G | G | 0.2337 | 0.1318 | 0.1159 | 0.1512 | 0.0012 | 0.0013 | 0.0252 |

^{a}Empirical overall p-values based on 100 000 000 permutations using the HTR program.
S1 to S9 correspond to SNP: rs20551, rs2294976, rs2076578, rs1006407, rs8779, rs132806, rs5758405, rs881542, rs926333.
— = no value calculated by HTR.

TABLE 8
Selected individual haplotypes and SNPs having a consistent distribution inbetween samples.

| | Haplotype | | | | | | | | | Haplotype frequency | | | | Empirical p-values^{a} | | |
|---|---|---|---|---|---|---|---|---|---|---|---|---|---|---|---|---|
| Sample | S1 | S2 | S3 | S4 | S5 | S6 | S7 | S8 | S9 | Controls | CASES | BPD | SZ | Combined | BPD | SZ |

| | | | | | | | | | | | | | |
|---|---|---|---|---|---|---|---|---|---|---|---|---|---|
| DK | | | | | 2 | | 0.2300 | 0.1330 | 0.1200 | 0.1400 | 0.0005 | 0.0008 | 0.0086 |
| UK | | | | | 2 | | 0.2300 | 0.1700 | 0.1700 | 0.1700 | 0.1777 | 0.1882 | 0.3350 |
| Scottish | | | | | 2 | | 0.2000 | 0.1907 | 0.1650 | 0.2300 | 0.7099 | 0.1884 | 0.2902 |
| Combined | | | | | 2 | | 0.2000 | 0.1700 | 0.1600 | 0.1800 | 0.0050 | 0.0017 | 0.1295 |
| DK | 1 | 2 | | | | | 0.0054 | 0.0072 | 0.0041 | 0.0121 | 0.8689 | 0.8511 | 0.6778 |
| UK | 1 | 2 | | | | | 0.0144 | 0.0374 | 0.0557 | 0.0181 | 0.0254 | 0.0015 | 0.7145 |
| Scottish | 1 | 2 | | | | | 0.0184 | 0.0271 | 0.0298 | 0.0230 | 0.3366 | 0.2798 | 0.6337 |
| Combined | 1 | 2 | | | | | 0.0140 | 0.0279 | 0.0355 | 0.0179 | 0.0291 | 0.0028 | 0.5858 |
| DK | | 1 | 1 | 1 | | | 0.0000 | 0.0442 | 0.0000 | 0.0950 | 0.0530 | — | 0.0006 |
| UK | | 1 | 1 | 1 | | | 0.0118 | 0.0196 | 0.0078 | 0.0296 | 0.0324 | 0.3299 | 0.0166 |
| DK | | | | | 1 | 2 | 0.2808 | 0.1700 | 0.1650 | 0.1760 | 0.0007 | 0.0030 | 0.0042 |
| UK | | | | | 1 | 2 | 0.2310 | 0.1840 | 0.1780 | 0.2140 | 0.0209 | 0.0167 | 0.1399 |
| Scottish | | | | | 1 | 2 | 0.3150 | 0.3180 | 0.2890 | 0.3680 | 0.5508 | 0.5385 | 0.6798 |
| Combined | | | | | 1 | 2 | 0.2660 | 0.2120 | 0.2040 | 0.2220 | 0.0011 | 0.0005 | 0.0716 |
| DK | | | | | 2 | 2 | 0.2337 | 0.1318 | 0.1159 | 0.1512 | 0.0012 | 0.0013 | 0.0252 |
| UK | | | | | 2 | 2 | 0.1941 | 0.1636 | 0.1642 | 0.1629 | 0.1437 | 0.1745 | 0.2537 |
| Scottish | | | | | 2 | 2 | 0.1970 | 0.1624 | 0.1558 | 0.1760 | 0.3795 | 0.1802 | 0.7788 |
| Combined | | | | | 2 | 2 | 0.2011 | 0.1551 | 0.1509 | 0.1605 | 0.0020 | 0.0016 | 0.0670 |

^{a}Empirical overall p-values based on 100,000,000 permutations using the HTR program.
S1 to S9 correspond to SNP: rs20551, rs2294976, rs2076578, rs1006407, rs8779, rs132806, rs5758405, rs881542, rs926333.
— = no p-value calculated by HTR.

TABLE 9
Intermarker linkage disequilibrium measured by D′.
Cases above and right of diagonal, controls below and left of diagonal

| | | | | | | | | | | |
|---|---|---|---|---|---|---|---|---|---|---|
| Gene | SNP | S1 | S2 | S3 | S4 | S5 | S6 | S7 | S8 | S9 |

DK sample

| | | | | | | | | | | | |
|---|---|---|---|---|---|---|---|---|---|---|---|
| EP300 | rs20551 | (S1) | | 0.60 | 0.62 | [symbol] | [symbol] | 0.01 | [symbol] | 0.17 | 0.12 |
| EP300 | rs2294976 | (S2) | 0.52 | | [symbol] | [symbol] | 0.57 | [symbol] | [symbol] | 0.01 | 0.10 |
| EP300 | rs2076578 | (S3) | [symbol] | [symbol] | | 0.42 | 0.62 | 0.14 | 0.39 | 0.16 | 0.10 |
| PIPPIN | rs1006407 | (S4) | 0.43 | 1.00 | 0.57 | | [symbol] | 0.63 | [symbol] | 0.14 | 0.23 |
| NHP2L1 | rs8779 | (S5) | 0.52 | 0.91 | [symbol] | [symbol] | | 0.55 | [symbol] | 0.34 | 0.20 |
| NHP2L1 | rs132806 | (S6) | 0.01 | [symbol] | 0.12 | [symbol] | [symbol] | | 0.45 | 0.25 | 0.17 |
| NHP2L1 | rs5758405 | (S7) | [symbol] | [symbol] | [symbol] | [symbol] | [symbol] | [symbol] | | 0.68 | 0.16 |
| SERHL | rs881542 | (S8) | 0.19 | 0.19 | 0.14 | 0.11 | 0.06 | 0.09 | 0.29 | | 0.00 |
| SERHL | rs926333 | (S9) | 0.35 | 0.24 | 0.37 | 0.00 | 0.06 | 0.29 | 0.02 | [symbol] | |

UK sample

| | | | | | | | | | | | |
|---|---|---|---|---|---|---|---|---|---|---|---|
| EP300 | rs20551 | (S1) | | [symbol] | [symbol] | [symbol] | 0.28 | 0.21 | [symbol] | 0.02 | 0.02 |
| EP300 | rs2294976 | (S2) | [symbol] | | [symbol] | [symbol] | 0.27 | [symbol] | [symbol] | 0.20 | 0.04 |
| EP300 | rs2076578 | (S3) | [symbol] | [symbol] | | 0.47 | 0.09 | 0.14 | 0.53 | 0.16 | 0.14 |
| PIPPIN | rs1006407 | (S4) | [symbol] | 0.63 | 0.53 | | [symbol] | [symbol] | [symbol] | 0.00 | 0.29 |
| NHP2L1 | rs8779 | (S5) | [symbol] | [symbol] | 0.51 | [symbol] | | [symbol] | [symbol] | 0.02 | 0.65 |
| NHP2L1 | rs132806 | (S6) | 0.05 | 0.70 | 0.10 | [symbol] | [symbol] | | [symbol] | 0.10 | 0.40 |
| NHP2L1 | rs5758405 | (S7) | [symbol] | [symbol] | 0.60 | [symbol] | [symbol] | [symbol] | | 0.00 | 0.13 |
| SERHL | rs881542 | (S8) | 0.02 | 0.05 | 0.14 | 0.03 | 0.04 | 0.13 | 0.07 | | 0.18 |
| SERHL | rs926333 | (S9) | 0.01 | 0.01 | 0.03 | 0.25 | 0.30 | 0.07 | 0.57 | 1.00 | |

Scottish sample

| Gene | SNP | | S1 | S3 | S4 | S5 | S8 | S9 |
|---|---|---|---|---|---|---|---|---|
| EP300 | rs20551 | (S1) | | [symbol] | [symbol] | 0.46 | 0.06 | [symbol] |
| EP300 | rs2076578 | (S3) | [symbol] | | 0.31 | 0.07 | 0.09 | 0.04 |
| PIPPIN | rs1006407 | (S4) | [symbol] | 0.63 | | [symbol] | 0.09 | 1.00 |
| NHP2L1 | rs8779 | (S5) | [symbol] | 0.61 | [symbol] | | 0.11 | [symbol] |
| SERHL | rs881542 | (S8) | 0.01 | 0.32 | 0.24 | 0.17 | | 0.03 |
| SERHL | rs926333 | (S9) | 0.21 | 0.47 | 0.12 | 0.07 | 1.00 | |

Significant (P < 0.05) D′ values >0.65 in bold and italic

1. A method for determining the predisposition for a mental disease, such as schizophrenia (SCH) and/or bipolar disorder (BPD) in a subject comprising determining in a biological sample isolated from said subject one or more polymorphisms in the DNA sequence of chromosome 22q13 containing the NHP2L1, PACSIN2, SERHL, PIPPIN, BRD1, EP300, FAM19A5 and/or GPR24 genes or in a translational or transcriptional product of said genes.

2. The method according to claim 1, wherein the polymorphism is a single nucleotide polymorphism (SNP).

3. The method according to claim 2, wherein the predisposition is determined by determining the presence of one or more SNPs in the DNA sequence of one individual gene selected from any of the genes of the group consisting of the NHP2L1, PACSIN2, SERHL, PIPPIN, BRD1, EP300 and GPR24 genes.

4. The method according to claim 1, wherein at least one of the polymorphisms is located in a non-coding region of the gene DNA sequence.

5. The method according to claim 4, wherein the non-coding region is an intron, or a region controlling the gene expression.

6. The method according to claim 1, wherein the at least one of the polymorphisms is determined in a coding region of the gene DNA sequence.

7. The method according to claim 1, wherein two or more polymorphisms are determined.

8. The method according to claim 7, wherein the two or more polymorphisms are SNPs.

9. The method according to claim 8, wherein the two or more SNPs are determined in the DNA sequence of the same gene, said gene is selected from the group consisting of NHP2L1, PACSIN2, SERHL, PIPPIN, BRD1, EP300, FAM19A5, and GPR24.

10. The method according to claim 8, wherein the two or more SNPs are determined in the DNA sequences of two or more different genes selected from the group consisting of NHP2L1, PACSIN2, SERHL, PIPPIN, BRD1, EP300, FAM19A5, and GPR24.

11. The method according to claim 1, wherein the SNP is selected from the group consisting of SNPs having refSNP IDs: rs11561, rs5758405 rs8779, rs132806, rs2068943, rs2267487, rs881542, rs926333, rs1060387, rs1006407, rs6002408, rs4468, rs138855, rs2239848, rs138880, rs138881, rs20551, rs2294976, rs2076578, rs1046088, rs133068, rs133069, rs133070, rs133073, and rs6002408.

12. The method according to claim 1, wherein the predisposition to SCH and/or BPD is determined by determining of the presence of the risky allele of an SNP selected from the group consisting of SNPs having refSNP IDs: rs11561, rs5758405 rs8779, rs132806, rs2068943, rs2267487, rs881542, rs926333, rs1060387, rs1006407, rs6002408, rs4468, rs138855, rs2239848, rs138880, rs138881, rs20551, rs2294976, rs2076578, rs1046088, rs133068, rs133069, rs133070, rs133073, and rs6002408.

13. The method according to claim 1, wherein the predisposition to SCH and/or BPD is determined by determining the presence of a specific haplotype comprising two or more of the SNPs selected from the group consisting of SNPs having refSNP IDs: rs115611, rs5758405 rs8779, rs132806, rs2068943, rs2267487, rs881542, rs926333, rs1060387, rs1006407, rs6002408, rs4468, rs138855, rs2239848, rs138880, rs138881 rs20551, rs2294976, rs2076578, rs1046088, rs133068, rs133069, rs133070, rs133073, and rs6002408.

14. The method according to claim 13, wherein the specific haplotype comprises at least one of the SNPs and a polymorphism of the DNA sequence in the region comprising 100 to 10000 base pairs upstream or down stream from said SNP.

15. The method according to claim 14, wherein the polymorphism is SNP.

16. The method according to claim 15, wherein the SNP is selected from the group consisting of SNPs having refSNP ID No: rs132234, rs3752466, rs6010260, rs137931, rs137932, rs3810971, rs2272843, rs1063900, rs715519, and rs916005.

17. The method according to claim 16, wherein the SNP is a part of a haplotype comprising at least one of the SNPs selected from the group consisting of SNPs having refSNP ID NOs: rs4468, rs138855, rs2239848, rs138880, and rs138881.

18. The method according to claim 15, the SNP is selected from the group consisting of SNPs having refSNP ID No: rs909660, rs710193, and rs1573745.

19. The method according to claim 18, wherein the SNP is a part of a haplotype comprising at least one of the SNPs selected from the group consisting of SNPs having refSNP ID NOs: rs133068, rs133069, rs133070, and rs133073.

20. The method according to claim 13, wherein the specific haplotype comprises a polymorphism in a chromosome region adjacent to the region containing a gene selected from the group consisting of the NHP2L1, PACSIN2, SERHL, PIPPIN, BRD1, EP300 and GPR24 genes.

21. The method according to claim 14, wherein the polymorphism is in linkage disequilibrium with at least one of the SNPs having refSNP IDs: rs11561, rs5758405 rs8779, rs132806, rs2068943, rs2267487, rs881542, rs926333, rs1060387, rs1006407, rs6002408, rs4468, rs138855, rs2239848, rs138880, rs138881, rs20551, rs2294976, rs2076578, rs1046088, rs133068, rs133069, rs133070, rs133073, and rs6002408, the group consisting of SNPs having refSNP ID No: rs132234, rs3752466, rs6010260, rs137931, rs137932, rs3810971, rs2272843, rs1063900, rs715519, and rs916005, the group consisting of SNPs having refSNP ID NOs: rs4468, rs138855, rs2239848, rs138880, and rs138881, the group consisting of SNPs having refSNP ID No: rs909660, rs710193, and rs1573745, and the group consisting of SNPs having refSNP ID NOs: rs133068, rs133069, rs133070, and rs133073.

22. The method of claim 21, wherein the polymorphism is SNP.

23. The method according to claim 1, wherein a SNP(s) is (are) determined in
i) a nucleotide sequence selected from SEQ ID NOs: 1-7 and 94,
ii) a sequence having at least 90% sequence identity with SEQ ID NOs: 1-7 and 94, or a fragment thereof, and
iii) a sequence being complementary to one of these sequences or a fragment thereof.

24. The method according to claim 1, wherein the SNP(s) is (are) determined in the transcriptional or translational products of the genes as defined in claim 1.

25. The method according to claim 24, wherein the transcriptional products of the genes being selected from the group consisting of
(i) nucleic acid sequences identified as SEQ ID NO: 8-14, or fragments thereof,
(ii) nucleic acid sequences having at least 90% identity with
SEQ ID NO: 8-14 or fragments thereof, and,
(iii) nucleic acid sequences being complementary to any of the sequences of (i) or (ii),
said nucleic acid sequences comprising the polymorphism(s) of the corresponding genomic sequences identified as SEQ ID NO: 1-7 and 94.

26. The method according to claim 24, wherein the translational products of the genes being selected from
i) polypeptide sequences identified as SEQ ID NOs: 87-93 or fragments thereof,
ii) polypeptide sequences having at least 90% identity with the polypeptide sequences of (i), or fragments thereof,
said polypeptide sequences comprising a polymorphism(s) corresponding to the polymorphism(s) of the corresponding nucleic acid sequence(s), said nucleic acid sequence(s) being identified as SEQ ID NO: 1-7 and 94 or SEQ ID NO: 8-14.

27. The method according to claim 1, wherein the presence or absence of a polymorphism is detected in a target nucleic acid sequence isolated from a biological sample.

28. The method according to claim 27, said method comprising amplification of the target nucleotide sequence.

29. The method according to claim 27, wherein the nucleotide sequence is a genomic DNA sequence, a mRNA sequence, or a cDNA sequence.

30. The method according to claim 27, wherein amplification comprises use of a primer pair selected from the oligonucleotide sequences identified as SEQ ID Nos: 15-86.

31. The method according to claim 1, wherein the presence or absence of the polymorphism is determined in a variant protein, said variant protein being a translational product of a gene selected from the genes as defined in claim 1, wherein said variant protein comprising a polymorphism corresponding to the polymorphism of the nucleic acid sequence encoding said variant protein.

32. The method according to claim 31, wherein the variant protein is NHP2L1 protein (SEQ ID NO: 87) having the sequence wherein amino acid residue Thr at position 43 is substituted for amino acid residue Ala.

33. The method according to claim 31, wherein the variant protein is SERHL protein (SEQ ID NO: 89) having the sequence wherein amino acid residue Ala at position 2 is substituted for amino acid residue Val.

34. The method according to claim 31, wherein the variant protein is SERHL protein (SEQ ID NO: 89) having the sequence wherein amino acid residue Ser at position 46 is substituted for amino acid residue Ala.

35. The method according to claim 31 wherein the variant protein is EP300 protein (SEQ ID NO: 92) having the sequence wherein amino acid residue Ile at position 997 is substituted for amino acid residue Val.

36. The method according to claim 31, the variant protein is EP300 protein (SEQ ID NO: 92) having the sequence wherein amino acid residue Gln at position 2223 is substituted for amino acid residue Pro.

37. The method according to claim 1, wherein the predisposition to a mental disease is determined by determining the presence of a haplotype comprising the SNPs having refSNP No: rs133068, rs133069, rs133070, rs133073 and one or more SNPs as defined in claim 18.

38. The method according to claim 1, wherein the predisposition to a mental disease is determined by determining the presence of a haplotype comprising the SNPs having refSNP No: rs4468, rs138855, rs2239848, rs138880, rs138881 and one or more SNPs as defined in claim 16.

39. The method according to claim 1, wherein the predisposition to a mental disease is determined by determining in a biological sample isolated from said subject the risky allele(s) of an SNP(s) from the group consisting of SNPs having refSNP ID No: rs132234, rs3752466, rs6010260, rs137931, rs137932, rs3810971, rs2272843, rs1063900, rs7155191 and rs916005.

40. A method for determining the absence of predisposition to a mental disease, such as SCH and/or BPD, in a subject comprising determining in a biological sample isolated from said subject a protective allele of an SNP(s) selected from the group consisting of SNP(s) having refSNP IDs: rs11561, rs5758405 rs8779, rs132806, rs2068943, rs2267487, rs881542, rs926333, rs1060387, rs1006407, rs6002408, rs4468, rs138855, rs2239848, rs138880, rs138881, rs20551, rs2294976, rs2076578, rs1046088, rs133068, rs133069, rs133070, rs133073, and rs6002408.

41. A method for determining a protection against a mental disease, such as SCH and/or BPD, in a subject comprising determining in a biological sample isolated from said subject a protective allele of an SNP(s) selected from the group consisting of SNP(s) having refSNP ID No: rs11561, rs5758405 rs8779, rs132806, rs2068943, rs2267487, rs881542, rs926333, rs1060387, rs1006407, rs6002408, rs4468, rs138855, rs2239848, rs138880, rs138881, rs20551, rs2294976, rs2076578, rs1046088, rs133068, rs133069, rs133070, rs133073, and rs6002408.

42. An isolated oligonucleotide comprising at least 10 contiguous nucleotides being 100% identical to a subsequence of a gene selected from the group consisting of the NHP2L1, PACSIN2, SERHL, PIPPIN, BRD1, EP300 and GPR24 genes, comprising or adjacent to a polymorphism or mutation being correlated to an mental disease.

43. The isolated oligonucleotide according to claim 42, wherein the polymorphism is located in the centre of the nucleic acid sequence.

44. The isolated oligonucleotide according to claim 42, wherein the polymorphism is located in the 5′ end of the nucleic acid sequence.

45. The isolated oligonucleotide according to claim 42, wherein the mutation/polymorphism is located in the 3′ end of the nucleic acid sequence.

46. The isolated oligonucleotide according to claim 42, wherein the sequence is adjacent to the mutation/polymorphism, either in the 3′ or 5′ direction.

47. The isolated oligonucleotide according to claim 42, said oligonucleotide being selected from the oligonucleotides identified as SEQ ID NO: 15-86.

48. A diagnostic kit comprising at least two oligonucleotides as defined by claim 42.

49. The diagnostic kit according to claim 48, wherein the at least two oligonucleotides are the amplification primers or probes for determining a polymorphism associated with a predisposition to a mental disease.

50. The diagnostic kit according to claim 49, wherein the probe is linked to a detectable label.

51. The diagnostic kit of claim 49, wherein the primers or probes are selected from the nucleic acid sequences identified as SEQ ID NOs: 15-86.

52. A variant protein of claim 32 wherein said variant protein comprising a polymorphism corresponding to the polymorphism of the nucleic acid sequence encoding said variant protein, said protein being indicative of a predisposition to a mental disease, and said variant protein being selected from the group consisting of (a) a variant NHP2L1 protein (SEQ ID NO: 87) having the sequence wherein amino acid residue Thr at position 43 is substituted for amino acid residue Ala, (b) a variant SERHL protein (SEQ ID NO: 89) having the sequence wherein amino acid residue Ala at position 2 is substituted for amino acid residue Val, (c) a variant SERHL protein (SEQ ID NO: 89) having the sequence wherein amino acid residue Ser at position 46 is substituted for amino acid residue Ala, (d) a variant EP300 protein (SEQ ID NO: 92) having the sequence wherein amino acid residue Ile at position 997 is substituted for amino acid residue Val, and (e) a variant EP300 protein (SEQ ID NO: 92) having the sequence wherein amino acid residue Gln at position 2223 is substituted for amino acid residue Pro.

53. An antibody capable of selectively binding to a variant protein of claim 52 to an epitope comprising a polymorphism of the variant protein.

54. A diagnostic kit comprising an antibody selected from the antibody(s) according to claim 53.

55. The diagnostic kit according to claim 54, said kit further comprising at least two oligonucleotide each being an isolated oligonucleotide comprising at least 10 contiguous nucleotides being 100% identical to a subsequence of a gene selected from the group consisting of the NHP2L1, PACSIN2, SERHL, PIPPIN, BRD1, EP300 and GPR24 genes, comprising or adjacent to a polymorphism or mutation being correlated to an mental disease.

56. A gene therapy vector comprising
(i) a DNA sequence selected from the sequences identified as SEQ ID NO 1-7 and 94, or a fragment thereof, or
(ii) a DNA sequence selected from the sequences identified as SEQ ID NOs: 8-14, or a fragment of said DNA sequence.

57. The gene therapy vector according to claim 56, wherein the DNA sequence or a fragment thereof comprises the protective allele of an SNP selected from the SNPs having refSNP IDs: rs11561, rs5758405 rs8779, rs132806, rs2068943, rs2257487, rs881542, rs926333, rs1060387, rs1006407, rs6002408, rs4468, rs138855, rs2239848, rs138880, rs138881, rs20551, rs2294976, rs2076578, rs1046088, rs133068, rs133069, rs133070, rs133073, rs6002408, rs132234, rs3752466, rs6010260, rs137931, rs137932, rs3810971, rs2272843, rs1063900, rs715519, rs916005, rs4468, rs138855, rs2239848, rs138880, rs138881, SNPs having refSNP ID No rs909660, rs710193, rs1573745, rs133068, rs133069, rs133070, and rs133073.

58. A method of treatment of a subject having the predisposition to a mental disease, said method comprising administering to said subject a therapeutically effective amount of a gene therapy vector as defined in claim 56.

59. A vector comprising a nucleic acid sequence selected from the nucleic acid sequences identified as SEQ ID NOs: 1-14, or a fragment thereof, said sequence, or said fragment comprising a polymorphism associated with a predisposition to an mental disease according to claim 1, said sequence being operably linked to a promoter sequence capable of directing the expression of a variant protein encoded by said sequence.

60. A compound capable of
i) inhibiting expression of a gene selected from the genes according to claim 1 said compound being selected from an isolated antisense nucleotide sequence or an nucleotide sequence complementary to the regulatory region of said gene, said nucleotide sequence being capable of forming triple helix structures that prevent transcription of said gene, and/or
ii) inhibiting activity of a transcriptional product of a gene selected from the genes according to claim 1, said transcriptional product being selected from the group consisting of
a) nucleic acid sequences identified as SEQ ID NO: 8-14, or fragments thereof,
b) nucleic acid sequences having at least 90% identity with SEQ ID NO: 8-14 or fragments thereof, and
c) nucleic acid sequences being complementary to any of the sequences of (a) or
said nucleic acid sequences a)-c) comprising the polymorphism(s) of the corresponding genomic sequences identified as SEQ ID NO: 1-7 and 94,
wherein said compound capable of (ii) is selected from an isolated antisense sequence or a ribozyme molecule, and/or
iii) inhibiting activity of a translational product of a gene selected from the genes according to claim 1, said transcriptional product being selected from the group consisting of
d) polypeptide sequences identified as SEQ ID NOs: 87-93 or fragments thereof,
e) polypeptide sequences having at least 90% identity with the polypeptide sequences of (i), or fragments thereof, said polypeptide sequences d) and e) comprising a polymorphism(s) corresponding to the polymorphism(s) of the corresponding nucleic acid sequences, said nucleic acid sequence(s) being identified as SEQ ID NO: 1-7 and 94 or SEQ ID NO: 8-14,
wherein said compound capable of (iii) is selected from an antibody molecule against said transcriptional product, or a molecule capable of interfering with biological activity of said transcriptional product.

61-62. (canceled)

63. A pharmaceutical composition for the treatment of mental disease, comprising a compound according to claim 59.

64. A method of treatment of a mental disease, comprising administering a compound according to claim 60.

65. A method of screening for a candidate compound for therapeutic treatment of a mental disease, said method comprising an in vitro or in vivo model system comprising a gene according to claim 1 or a product of said gene, said product being a transcriptional product of the gene.

66. The method according to claim 65, said method further comprising a cell expressing a gene according to claim 1, a transcriptional product of said gene or a translational product of said gene.

67. A method for prognosis of the likelihood of development of a mental disease comprising determining a polymorphism of a gene selected from the genes according to claim 1.

68. The method according to claim 67, wherein the mental disease is SCH and/or BPD.

69. A method of predicting the likelihood of a subject to respond to a therapeutic treatment of a mental disease, said method comprising determining the genotype of said subject in the chromosome areas comprising the NHP2L1, PACSIN2, SERHL, PIPPIN, BRD1, EP300, FAM19A5 and/or GPR24 gene.

70. The method according to claim 69, wherein the determining comprises assessing a polymorphism in the DNA sequence of the NHP2L1, PACSIN2, SERHL, PIPPIN, BRD1, EP300, FAM19A5 and/or GPR24 gene, or the corresponding polymorphism in a transcriptional or translational product of said gene, and/or assessing a polymorphism in the DNA sequence of chromosome 22q13, said polymorphism being in linkage disequilibrium with a SNP of the NHP2L1, PACSIN2, SERHL, PIPPIN, BRD1, EP300, FAM19A5 and/or GPR24 gene, said SNP being associated with a predisposition of a subject to a mental disease, such as SCH and/or BPD.

71. The method according to claim 70, wherein the polymorphism comprises or corresponds to an SNP selected from the SNPs having refSNP IDs: rs11561, rs5758405 rs8779, rs132806, rs2068943, rs2267487, rs881542, rs926333, rs1060387, rs1006407, rs6002408, rs4468, rs138855, rs2239848, rs138880, rs138881, rs20551, rs2294976, rs2076578, rs1046088, rs133068, rs133069, rs133070, rs133073, and rs6002408.

72. A method for assessing a therapeutic treatment for a mental disease, comprising using genotype data.

The application's sequence listing, which the Patent Office published only in electronic form, follows.

SEQUENCE LISTING (100 sequences)

SEQ ID NO: 1 - DNA, 18976 bp, Homo sapiens
taacaagtgacagagacaatcatggtgctgagggaagaagggtgaaggtgtatggggcccactcaccttgatgacattccttgtgctgaagcgggtcctggtgacctggtgccaacagtgccggacctgccagaccagaaagaggcagaggacaagcaggttgccacagcactgagggtccctgcagctgtgattctgggagagcaggccctgcactggctcccactcagggccatggaatggccccaccacagcacaggcacccagcagtgacaacaacatggcaaagcttagatcaggcagatggtgttgggagctagagggcaggcctggcacatctgatgcagccagctgcagtaggatagccgccacctcatagcacccctgtcactgaggccacctcacaaagggggctgatgccccagcctcaactctgaccctggtgccaggcctggttagcatgctcttggtgcaggtaaggacagtattggggaattgttcaaaagtaattaggaggaagaacttgttttaaacaaacccatcctctggaatgaaaagattaagttccctgaatgtgtgatggggtgatataacctgcggtctgcttgatttctttcttcctatgaaatacttggatctgcctgtccttctattatcaaacatttaatgaacactgtattgaatacatgtattcttgtttaaccactcaacatgcctttctcgttgcttgcagtatcctgatttcctgtgggggaattacttttcccatcttaggatcagtgttggtgggaaaataaatgttaccctgaagactcttttacccaaaagttctattcaaaatattaaatatctgagcaggcagggacgtcagccaattataatgagccaggccttaactgtttagtggctggaatttttttttttttttttgagaccgagtttccactcttgttgcccaggctggagtgcaatggcgcgatctcggctcactgcaacttccacctcccaagttcaagcgattctcctgcctcaacctcccgagtagctgggattacaggcatgcgccaccacgcccggctaattttgtatttttagtagagacgggggtttctccatattggtcaggctggtatcgaactcccaacctcaggtgatccgcccgcctcagcttcccaaagtgctgggattacaggcgtgagccaccgcacccggccctcttttttttcttcttttttttgagacggagtctcactctgttgcccaggctggagtgcagtgtgcagtggtgcgatctcggctcactgcaagctccgcctccggggttcacggcattctcctgcctcggcctcccgagtagctgggactacaggcgcccgccaccatgcccggctaattttttgtatttttagtagagacggttcactgtgttagccaggatggtctcgatctcctgacctagtgatccgcctgcctcagcctcccaaagtgctgcgattacaggcgggagccaccgcacccggccggcctttttttttttttttttgagagtctcgctctgtcgcctcagctggagtgctagagtgcagtggcatgatctcaacttactgtagcctccacctccggggttcaagcgattctcctgcttcagcctcctaagtagctggggttacaggcgcccgccaccacgcctggctaatttttgtattttttagtagggacgaggtttcgccatgttggccaggctggtctcgaactcctgtcctcaggtgatgcgcccgcctcggcctcccaaagtgccgggattacagccataagccgctgcggccggccggtgggttactttttgaatgtttaattcattgtttctgccaataatttgtactaggcagctcataagaacgccaaagtacgttccttcttcgacacagggccagtttccgcgccagtgcccccgtagagggcggggcccactcgctcgcgtagcgtcaccttcgcttcctgccgcgcggggccatttccgctgctgcttctgtgagtttttccggtgcacgcgagtgcttctgaaacgtcagctgcgctcccctaggagtgctgagcccgcggaaccgcagccatggtgagtgcgtgcgccggccgagggaccgggaagcgggagactcagggttgcgttcactccctagcctgttagatggaggcttagagcctgcgccgtctcatccgccggcgttgggtcttaaccgccgggcccttagttagaaccccagcagcggcggggtcccagcagcctggcccgaggttagaactcaggaaaccttaggatccccgcagctgtgttgctttgccgcacggtctgtttgcttggcaaaaggcctgcagcgagcggagggggcatggcccagcctgggagaaagagaccaacccacgtgggagagggcaaaaagttgggtgaagaaaacttggctccaacttttttttttccttgtttcttttcatacgaaatctacgatggcgtgggaccctgggattcggatcaacctctcctacccaccctacctcaccccacccccgttgctggggttcaggaggagatctcccatgggtctgcgcttagtgcccgccgcgagtcacacgcgccagggacctagaggagcctttggcatttgggggctgtggggaacatgaagtgagcgcgactcacggcctggagtgcaggaaaggcttctcctgcaaggcggtggcttcaaaaaccagaagtctggtagcaccacgtgcggcgtctctaaactcttggtcgtctctgacttttaaacatctagggaaagttctaaaacgtgtgtcctggcgtagtagttttggttggcacttggtgaggagggaagaatttgtaaagcactgtaacttctatagttaatccttccagtggagcttggatcccggcggtagcactccccacaaacctcctcccatgcattttgaagcttagtacgtggctgagcctagaacttgaagcttccaaactcagtgctcgctttaacgcagctccctgaaacgttttggaatcggatggtctcaggttgaactttgcagttttcctcaactgtaaaatggggatgacagtgcatgagggtgttgtgaggatcaaatgaaataaagcatggtaaacatctagtcctgatgcttggtacagagtaagcacgcagtatttgttgttcaatcaaaaccttgcaagttttggctgtctggtgtacagcgaaaccaaactgatcatgctaggtagggatttaggttggctggtggtatgatatcattcgttaatttatttaacccctgaagaaattgaaaggcaaataaatacaccctaagcaagtttcaattagtgtttataagctagtttggttttaaaattgagtttaacttttttgttgactaatagtgaaacatttaggtatttaatgattgttcagattcctgaagtcttcctcttttatgaatttgatgtttattgagatttgagaatcctgatttccagagaatgggttgttggaaacaatggcaatttttaaagtttttttaaattgacatatcatagttgtacatactttgggggttccatgtaatatttctaagtatatctattttaaaacatgcaacagggccaggcgcggtggctcatgcttgtaatcccagcactttgggaggctgaggcgggtggatcatggggtccggagtttgagaccagcctggccaacatagtgaaaccctgtttctactaaaaattcaaaaaaattagccaggcgtggtggtgggcacctgtaatcccagctacttgggaggctgaggcaaggagaatcgcttgaacctgggaggcgggggttgcagtgagccaagatcacaccactgcactccagcccgtgtgacagtttgagactccgtctcaaaaaaataaataaataaaacttgtgataaattattaaccaaaatttccagctgggcacggtggctcacgcctgtaatcccagcactttgggaggctgaggcgggtggatcatgaggtcaggagttcaagaccagcctgaccaacatggtgaaaccccatctctactaaaaatacaaaaattagccaggcgtggtggtgcgtgcctgtaatcccagctacttaggaggctgaggcaggagaatcactataaccggggaggcggtgtttgcagtgagccgagatcatgccactgcactacagcctgggtgacaaagcaagactgtgtcaaagaaaaaaaaaatccctactgtagtatcaaataaaacatttgtatggccggacgtggtagctcacacctgtaatcccagcactttgggaggccgaggcgggtggatcaccttaggtcaggagttcaacctggccaacatggtgaaacccccatctctactaaaaatacaaaaattagctgggcgtggtggtgcatgcctgtagtcccagttactcgggaggctgaggcaggagaattccttgaatatggaaggcagaggtttcggtgagccgagattgcgccactgcactccagcctgggcgacagagggagatgccgtctcttaaaaaaaaaaaaaaaagataaaagaataaactccaaatcagtagaggggaaaatagtgcaaatgcaatgataaatccagagaaaggaaagaaagaaaaagaaacagaacaagtggaacaaatagaaggcacaaaagaaggaaaatttgaaaccattataccaatacttaaatatgtaaagggactgagtgctccagttaaaagacgggatgtggccaagcactgtggctcaagcctgcaatcccagaaattgggaggctgaggcgagagaatctctttagcccaggaattggagaccacccagggcaaaatagtgagatcctgtctctacaaatttttttttttttttttttgagacagagtctcgctctgtcacccaggctgggtgtgcagtggcacgatcttgactcactgaaacctctgtctccttggttcaagcgattctcctgtttcagcctcccgagtagctgggattacaagcatgtgccaccatgcccggctattttttgtatttttttagtagagacggggttttgccgtgttggtcaggctggtctccaactcctgacctcaagtgatctgcctgcctcagcctcccaaagaggtgggattacaggcgtgagccaccacacccagcctaaacaattttttttttaattagccaggagttggccgggtgcagtggctcatgcctgtaaacccagcgctttgggaggctgaggtgggcggatcacaaggtcaggagttcaagaccagcctggccaacatggtgaaaccccgtctttactaataatacaaaaattagccgggcatggtggcgcatgcctgtaatcccagctactcaggacgctgaggcaggagaattgcttgaacctcggaggcagaagttgcggtgagccgagattgtgccactgcactccagcctgggcaacaagagcaaaactccgtctcaaaaaataaaaaataaaataaaataaaattagccaggagtggtggcccacacttgtagttccagttactgaggaggctgaggcaggaggatcgcttgagccctggaggtcgaggctgcagtgagctattgtcatgccactgcactctggtctcagtgatagagtgagaccctgtctcaacaacaaaaagggtgtaattctttttttttttttttttgagatggagtttcactctttcgcccaggctggagtgaagtggcatcatctcaacctactgcaatctccgcttcccgggttcaagccattctcctgcctcaacctccaagtagctgggattacaggtgcctgccaccacacccagataatttttgtattcttagtagagacgggggtttcaccatgtcatccaggctggtcttgaactcctgacctcaagagagccacccaccttggcctcccaaagtgctgggattataggtgtgagccactgtgcctggactgccccagctaagtttttaaatatttttagagatgggggtctcactgtgtggcccaggctggtctcaaacttcaggcctcaatcagtccccagcctcagtttcccaagttggtgggattataggcctgagccactgcagccagttcagaatacactcttcaaacatggaacgtttttgaaaattggccataaagcaagccctgcaaattttaacattggtaatattacataccatttttgcctaacccaaaaggaaataagttaaaaattagtaacaaagtagtttgaaatgaaaaatataaactatcagagagatttaaaaattgtagtaggaattcaaaaatagaacagaacaataatgaaaataccacataccagagcataagtgacaagggcagaggggggaagaaacaaatgaaaggatataatgaaagtattacttggagcctaagatgctaatgctagggagaaacgggataaaaaggtagaaaaaaacactagcacaaaataaccccaaagaaagtagaaggaaagaaaaaaaacaaaaggagaaattgctgaaatagaaagtagagcatactgctgggtcttttcctttccgaagcccctctttctcaccagagagagctgttctttctctttcttttgcctattaaacctctgctcccggccaggcgcagtggctcacacctgtaatcccagcactttgggaggtcgaggcaggtagatcacctgaggtcaggagttcgagaccagcctggccaacatggcaaaacccagtctctactaaaaaatacaaaaattagcccggtgtggtgacgcgcacctgtaatcccagctactggtgggggctgaggtaggagaattgcttgaacccaggaggcagaggttgcagtaagccaagatcgcactactacactccagcctgggcaacagagcaaaactccatctcaaaaaaaacaacaaaaaaaaaccctgctcctaaactcctgtgtgtccatgtcctaaattttcttggcatgagacaacaaaccctggatatttaccccaggcaacgaagctagttcagtttgacactgttgtcaaagttttggggaattagtcactgtcatgcattgctggtgggtgtgcaagttgttaaaccctatatagggtcaatttagaatagatataaaagttacaaatgcatattatatcttttgactcgttaatcccacttctaggagtttatcttacagatatactgaatgaaacataatatagattaggtatagatgagattagacattatagcatttacataatagtgaaagattaaaaaatatataaatgggctgggcacagtggctcacacctgtaatcccagtactttgggatgcccaggcaggaagattgcttgaggccaggagttcacgaccagcctggacaacataataagacagtgcctctaaaattaaaaaattagccagacgtggtggtgcatgcatgtagtcccagctacttgggagtctgaggcaggaggaccacttgagcccaggaaagtccccctcagaaagattaatcgaaaaaataaggccaggcacggtggctcacgcctgtaatcccaacactttgggaggctaaggcaagcggatcacttgaggtcagcaattgggagaccagactggccaacatggtgaaagaccttctctactaaaaatacagaaaaattagccgggcgtggttgtgcatgcctgtagtaccagctgctctggaggctgaggctggagaatcgcttgaaccccggaggaggttgcagtgagccaagatgccaccactacactccagcctgggtgacagagcgagaccctgtctcaaaaaagaaaatgtttaagtaggtaacatgtgaaggagacatactctatagacattaaaaagaaaggatggccaggtgcggtggctcatgcctgtaatcccagcactttgggaggctgaggcaggcagatgacctgagatcaggagttcgagaccagcctggccaaagtggtgaaaccccgtctctactaaaaatacaaaaatcagccggccgtgatggcggtcacctgtaatcctaggtactcaggaggctgaggctgcagtgagccgagatcgcgccactgcactccaacctaggcgacagagggagactccgtctctaaataaataaatgtatgaggaagagaaaaataatatggaggtcttcccttgacctcccccaacccccttcctttagagaactcctccatccttcacctaattcttcctagttgtcctgggaccaagacaaattcgcctaagataaggagttacgtagaagacagggcgtcctggtgtacgggctggccctggacgtcacttccgctggcggcagtggcgtcacttcctgctcttgggggcggggcatccgtgtccttgcggtgctgggcagcagaccgtccaaaccgacacgcgtggtatcctcgcggtgtccggcaagagactaccaagacagacgctatggtgagtgttcctactgggccattatctccgggtcacctcccgagagctgtggtgccgcgagcgtggtcccgctgtgtcagaaaagctgtaaaaaaacggaaggaggaaaaggcaggtgcgcggtgtcgggcaggagaccaccgaggcaggcgctatagatgagtggtcccaccaggccatctccgtctccagcgactgccgtccaccctatgtccagcctccaaggccgaggttaggtggtagccgcagtgaatcactcgcgattcgcacgttacacacgatggcgacatgtggggccgcacctgggttataatatgaatatatccttgtatataaatatgtgtttgtaaaaacaaaaaaaaaaagagaaaaattaatgaaaatgatttactggagcagtgggaatgagatggaaggagcggaataggcaggccactcacccaatatgctccctacatgggtgtgtatttatttatttattgagacggagtctcgctctgtcgcccacgctggagtgcagtggcgccatctccgctcattgcatcctccgcctcctgggttcaagctattctgcgtcagcctctcgagtagctaggactacaggcgtgagacaccgcgctcgtcccctacatgggttattttgacacagatctgaatgacatcattttatccataagtattacagtatatatctataaagtaagaatttttaacataactgcaaatgccattaattagttaataagggttgcaagttggtgatatttaactgtaccattccctctttatttattaggcggaagagtgatacaagaggtacttctcatcttctacctggttaccgcctaatacagcatttaggaaaggcacagaagatgattgtttccctttcccagttttcaaaatattgagttgctatcacttgcatagttttgacttttaaaccatgaagatattttacatatttgaaaaataaaatttaaagcaagctgactacaaaataaatctacttgtataccaaattgctaaccacaaggaaaattttaatttgaataacttttgaacaaagtcctgccactggatggctttgataggatatatcctaagaacaaaaataaattttgactttggtgagtttgttggtagaggtggtatattggtgtagcaattttggaaccattttgtgtgtattgtagaggaggtgaggaaatactttaatgtgttggaaaccatgggtttgaacagaagatacgcatatggagtggggaatggaaagaaaactttgtgctacatttactgtaaattatatcttattgattcagtaaattcaggtggaatacggaagttcaaatttaaagattacccatggactcctgacctcaggtgatccacccgcctcggccgcccaaagtgctgtgattacaggcgtgagccaggagtttgagaccagcctggccaacacggtgaaaccctgtctccacaaaaaatacaaaattagcctggcatggtggtgcacgcttatagtcccagctacttgggaggctgaggcacaagaatcatttgaactcgggaggcagagattgcagtaagctgaaatcgcaccactgcactccagcgtgggcaacagagcaagactccatctaaaaaataaaaacagaaatggattagccatggactcaaatggatgcggagccatgggaacccgtttgtaatccatttgctgtaatattatcaaacattcggctgaagaaagacaaaagtacatgagctttagtatactttactgaactgtgtaattcctaatagtgtatttcctttttttcgaaggtaggagtggaaagtccattgttaactacctggtgttttgtgtgtttgagggttagggagcagggcagctgccccctgtgtctcaattgttgattagtattttgtgactcaggtaggaaaacttctggctcaatttgtctgatatttttatgtcccccccatagactgaggctgatgtgaatccaaaggcctatccccttgccgatgcccacctcaccaagaagctactggacctcgttcagcagtcatgtaactataagcagcttcggaaaggagccaatgagggtaaggcagccacaggatgctctgggggaatgttaaaggcacctgtttccatctggggcctctgatctgatttccagtttgggaggagggctagctgctctcgactacaaccagtgggaggactttggcattagatgctaaagctgatgggctaagaattttttttagacccaccaattgttaacattttgccacatttaccttctttttcactctataagtgaattttatttttgctgagccatttgaaagcagttgtggagactgtatagtggctgtatgacctcaccagagccatcagaaggaaagggatattaatgctttttagcatcccttatacggtggatacttaacattcatgaatttcatttggttcccagaaacattccctacccctctcccttttttttttggatgcaattattcaaaaacatggaacgtttcacgaatttgcatgtcatccttgtgcaggggtcatgctaatcttctctgtattgttccaattttagtatatgtactgctgaagcgagcactacctccctttgtaaaaaaggaaaaaaaaaaagctgtttttcagtagaataattatgtatgcatgatgcttctgcccagaggtgatataggatactctcactttattcattattatttttttaattttattttatttatttatttatttttttatttggagagttttgctcttgttgcccaagctggagtgccatggcaggatctcagcttactgcaacctccgcttcccgggttcaaatgattctcctgcctcaacctcccaagtagctgggattacaggcatgcaccaccacgtccagctaattttgtatttttagtaaagatggggtttcactatgttggtcagtctggtctcgaactcctgatctcaggtgatctacctgccttggcctcccaaagtgctgctgggattacaggcgtgagacactgtgcccagccttatttttatttttattttttttcaagtagagacgaggtttcaccatgttggccaggctggtctcgaactcctgacctgaagtgatccgcctgccttggcctcccaaaattctgggattacaggcgtgagccactgtgcccggctgcccagccttatttttattttattttatttttttggagacagaatctcgctctgtcgcccaggctggtcttaaactcctgagctcaggcaatctgcctgccttggcctcccaaagtgttaggataacagcaggcgtgagctaccatgcccagccagaatactctcattttaatagatgctgggtagtttgatgtggtagagctcttttgtcgttgaagatttttaatggaaacatcagagattttgtcaactgtgtttgagatttaggagaactattacaatcgcttttacctgtgttgctgaaggaagataaagtagactctgtgggtctcgtcgtagtgctctttcctccctgctcgtcacactgcagtaactgcagtgcctggtatagcagtggccagtggggcattgtagggtgacccaccagctctcctgggaggtctctcttctcacttgatgcactcaggtcagcttggctgggcagggatgtgacttcttacacttcaggtagatgaggactcatggacacagagcaaccttatttcctcttgccatactttgcacggtgataagcacacaggtccttgaatggagatgctcagtctcagcgacttaattcagaatatgcttactgggagttcagggagggagatgcaacaattttccgtacttctgcctcagtgtcaggtattctttcttgccatatttattgattgcctgctatgtgccaggcgcatgtatatatgctgatgatgcactggtgaacaaaatgaagtctctgccttcttggagtatacattccagtggagaaagacataggttttatgcctggtggtaaagaatgctgtaagaggccgggcgcggtggctcacacctgtaatcccagcactttgggaggccgaggtgggcagatcatgaggtcaggagatcgagaccatcctggctaacacggtgaaacctcatctctaccaaaaatacaaaaaattagccgggcgtggtggcgggcgcctatagtcccagctgctcaggaggctgaggcaggaaaatggtgtgaacccgggaggcggagcttgcagtgagccgagatctcaccactgcactctagcctgggcgacagagtgagactccgtctcaaaaaaaaaaaaaagaatgctgtaaaacagaataaagtagagaagggggataggaatggcagtggtgggtctttttagatggagtattcagagaaggtctgtctgaggagtttgagcagagaactgaatagatgagggtgttggaaagaaacgtttttgggcatggtgtaaaggcatgcttgagggattctaaggaggctggtgtgtggctggaactaagtgtggggatgagaggtactaggagatcacatgagaccatgtaggccactgttagcagtgagtacaatggtaaatgagtagaaggattttgaacagcaagattgctatgatcttacttaacacttataaaagagtcactcctatgacttttgtagggtgagtaagctatagtaatatcaatagaaatgaacatgctttgcatttgccatgtgtcaggtattattattattatttattttacttttttttgagatagggtcttactctgcagcccaggctggagtgcattggcattgatcatggctcactgcagccacgacctcctgggcttaggtgatcctcccacctcagcgtcccaggtagctggaactacaggtgtacgccaccacacctggctaattttttatatttttagtagagatggggttttgccatgttgcccaggctggtctcaaactctgagttcaaacaatctacctgcctcagcctcccagtgggctgggattacaggtgtgagccaccatgcccagcctcatcattcttattaactggtttaatcctttcaataatcctattaagtagaattattaggtaattagaattaggttaaaaagagctgaggtgtgggtgttcgtttctcaggtgaaacatggctaaaagcttacggagtaagtggaaaagaaagatgcgtgctgaaaagagaaaaaagaatgccccaaaggaggccagcaggcttaaaagtattctcaaactagacggtgatgttttaatgaaagatgttcaagagatagcaactgtggtggtacccaaacattgccaagagaaaatgcaatgtgaggtaaaagatgaaaaagatgacatgaaaagggagactgatactaagagaaacaaaaagactcttctagaccagcatggacagtacccaatatggatgaaccaaaggcaaagaaaaaggctgacggcaaagcgagagaaaagaaaggggaaaagcaaagcaaaagcagtgaaagtggcaaagggtttggcgtggtagactcttaaaaccttggaaaatgccacatgggatagatgatggattagaatgtatatacatgtatactttgatttcagctgccaccaaatgaaaaccatttgttttcctattttaacttggccttttttcttcaattcaaacccagcataactcctgaagtttgttttgggaacttgaataaaatattttctttgatacaaaaaaaaaaaagaattaggttaaaaagaattaggtaattctttttttattaggtagaatcctgttaggtagaattattttatagatgataaaagtaagggaagttaaacaccttgctcaaggtcatttgtgtaacaagaatgagtgccagcatttgcactcagacagtgtagctctagagtgtgtgcccttctcaagtactccagcatgaatgcagagtattcgcactgagccacagaggcaagcagtcaggagagtacgcatctgaaacggtgctgtggggtgttgaacttgcatggtgagtcgcatgtgggatcagctttctagaagtattgattatggcagattgagatggtaaaactctgactctcagtcacagataccttgagaaatactatattattaatatactactacttgctggtgggggtttgtggaagctgttgcagttgacaaggtaagagatgatggtgacttggacgagtatagcagaggagtagaaagaagtggtcagggccaggcgtggtggctcatgcctgtaatcacagcactttgggaggccaaggtgggtggatcacaaggttaggagtttgagaccagcctggccaacatagtgaaacaaaaaattagctgggcatggtggcaggcacctgtaatcccagctacttgggaggctgaggcaggagaatcacttgaacctgggaggcagaggttgcaatgagccaagattgcgccattgcactccagcccgggcgacagtgtgagactccatctcaaaaaaagaaaaaaaaaaaaaaaagaaagaaaaaagttgtcagattaggacaggcacagtggctcatacctgtaatttcagcactttgggaggccgaggtgggtggatcacttgaggtcaggagtttgagaccagcctggacaacatggtgaagccctctctctactaaaaatacaaaaattagctaaacacagtggcacgtgcctgtaatcccagctgcttgggagactgaggcaggagaatcacttaaacccgggaagcggaggttgaagtgagccaagatcgcaccactgcactccagctgtgtgacagagcaagactccatctcaaaaaaaaaaaagaagaagaagaagtggtcagattcaggacgtgttttgaggataagtggtggatttaatgtagggcttgagaaaatgccattgtgtatgactgactggtgtttgaatcctttatcatatcccagggccggtctaggacacataattgtgtgtgcctaggcattcttcccagtttgttgtggctgccctgcccaagcccacatcacctattagcttcacgtccttctctccgcagccaccaaaaccctcaacaggggcatctctgagttcatcgtgatggctgcagacgccgagccactggagatcattctgcacctgccgctgctgtgtgaagacaagaatgtgccctacgtgtttgtgcgctccaagcaggccctggggagagcctgtggggtctccaggcctgtcatcgcctgttctgtcaccatcaaagaaggctcgcagctgaaacagcagatccaatccattcagcagtccattgaaaggctcttagtctaaacctgtggcctctgccacgtgctccctgccagcttcccccctgaggttgtgtatcatattatctgtgttagcatgtagtattttcagctactctctattgttataaaatgtagtactaaatctggtttctggatttttgtgttgtttttgttctgttttacagggttgctatcccccttcctttcctccctccctctgccatccttcatccttttatcctccctttttggaacaagtgttcagagcagacagaagcagggtggtggcaccgttgaaaggcagaaagagccaggagaaagctgatggagccaggacagagatctggttccagctttcagccactagcttcctgttgtgtgcggggtgtggtggaattaaacagcattcattgtgtgtccctgtgcctggcacacagaatcattcatacgtgttcaagtgatcaaggggtttcatttgctcttgggggattaggtatcatttggggaggaagcatgtgttctgtgaggttgttcggctatgtccaagtgtcgtttactaatgtacccctgctgtttgcttttggtaatgtgatgttgatgttctccccctacccacaaccatgcccttgagggtagcagggcagcagcataccaaagagatgtgctgcaggactccggaggcagcctgggtgggtgagccatggggcagttgacctgggtcttgaaagagtcgggagtgacaagctcagagagcatgaactgatgctggcatgaaggattccaggaagatcatggagacctggctggtagctgtaacagagatggtggagtccaaggaaacagcctgtctctggtgaatgggactttctttggtggacacttggcaccagctctgagagcccttcccctgtgtcctgccaccatgtgggtcagatgtactctctgtcacatgaggagagtgctagttcatgtgttctccattcttgtgagcatcctaataaatctgttccattttgatgacagaatggcagtgcctgattcttagtaagtatccggctaaaattggaatgaagacatacttagctttactagagtggtgatagctgcttaagactttttttttcttctttgtgaaagagtttcactcttgttgcctaggctggagtgcaatggcacgatctcggctcactgcagcctctgcctcctgggttcaagtgatgctcctgcctcagcccccaaagtagctgggattacaggcgtgcgtcaccacgcccagctaattttgtatttttagtagagacagggtttcaccatgttggccaggctggtcttgaactcctgacctcaggtaatctgcctgtctcagcctcgcaaagcgctgggattacaggtgtgagccaccacgcctggccacttgcttagacttttttttaccagaaggctatggaagagctgtctcctcctaccaggtagtttctaccttggcagttcaaaatgtcgtcttatacacactcaactggagcattgctatcactggaactggctttctcaacctccgtgctgttgacatttggggctggttaatttgttgtgaggactgccctgtgtgttgtatgtttagtagcatcactggcttctacccgctaggtggcaatagcagcacccccccacaaccaaaaaatgtttccggacattgttaaatgcccccggcagtaaaatcacccccaattgagaatcactgttggagaatcagggtttctagtaacccttggcacatgcaggattggtattggtgactaaagccactgccccctcacttgcctcttctacttattatcttaaggataagttccttgagagcctaataactcagcttgagaaatcttccaaggtgcaagtaactgggtaccatagtgatcccctctttgccagcttgggccaatatacccctgctctagcaagaagcacacctgggggaacctggcagccaccttagccagtcggacctgttctgtgcatcctgggctggtcatttctcccagcttactccagtgttctcatcaccacccctgaagcagttttatatttttggatggtggaattttacacagtgcttactttttcacagtcatgcattcagtgtttttggtcaatgacagaccacatatatgacagtggtcccctaagattgtaatactgtgtttttactgtacctttcctacgttaagatgcacaaatgccattgtgttacaattgcctacggtattcagtaacatgcagtacaggtttgtagcctaggtgtatgtatagtaggctgttccatctagggttttgtttgtttgtttgagacagtctcactctgtcgcccaggctggagtgcagtggtataatctcagctcactgcaacctccgcctcctgggttcaagcgattcttttgcctcagcctcctgagtagctgggattacaggagcacgccaccacacccggctaatttttgtatttttagtagagacagggtttccccatgttggtcaggctggtcttgaactcctgatctcttgatctgcccacctcggcctcccaaagtgctgggattacaagcgtgagccaccgcacccagccggtttttgtaagtatactctatggtgtttacacagtgacgaaattgcctaacaatgcatttttcagaacttacctctgtcattaaatgacacattacttttttttttttttgagacagtctcgctctgtcaccaaggttggagtgcagtggagcaatctcagctcactgcaacctccgcctcctgggtttaagcgatgctccttcctcagcctcctgaatagctgggattacagacacacgccaccacgcccagctaacttttgtgtttttagtagagacggggttttaccatgttggccaggctggtcgggaactcctaacctcaagtgatccaacctgcctcagcctcccaaagtgctgggattacaggcgtgagccatcccgcccagccaacgta

SEQ ID NO: 2 - DNA, 149375 bp, Homo sapiens
gcggagtctcactctgttgcccgggctggagtgcagtggcgcgatatcagctcactgcaagctccgcctcccgggttcacgccattctcctgcctcagcctcccgagtagctgggaccacaggcgaccgccaccacgcctggctaattttttgtatttttagtagagacagggtttcaccatgttagccaggatggtcttgatctcctgacctcgtgatccgcccgtctcggcctcccaaagtgctaggattacaggcgtgagccacagcgcccgacaaggctctatatttttatagggcatggaattgcgatgtaagcggaacttacccagatatgaaagtgctgagagctgatggctgagttctatctatacaaatggtccacaggtattgtgggtggcaaagaggtccctgttggctcagtcctggagaatgaggagagacttcttggcagtggtttgtcctggcactgtgtgttggttttttttttttttttttgagatggagtctcgcactgtcgccagggctggagtacagtggcgtgatcttggctcactgcaacctccgcctcccaggttcaagtgattctcctgcctcagactcccaagtagctgggattacaggtgcatgccaccacacccagctaattttttgtatttttagcagagacaggctttcactgtgttggccaggctggtctcaaactcctgaccttgtgatctgcccgcctcggcctcccagagtactgggattccaggcgtgagccaccgtgcctagccggttcttttgtttctttctcaattattgtcataaggacaatgccacagagcagtctagaaagtaaacaaccactagatttctttgtggactcttttctcatacctatctatatgtagcagcaattctacagtttctaccattttgtatctagctttttcttttattattattttcttttattttactttttagagaactgggtcttgctatgtggcccaggttggcctcaaactcctgggctgaagcgattctcctgcctcggcgtcccaagaagctgggattccaggtgcatgtcaccatgcctggctctatctggctttttcttttaacgttttagtttaagcattttcccatagtgctacacagtcatcattattattctcaagggttgggctgacctgggtttctaatcctggctctgccatttactctctttactccacatcacccccagcaagttacctggctcacccctcacctggggttcctctcaccatcctctccacctggatgacatgaagcagtgcttggacagcgcgtaggacagtgctcaggaagtgctctccattttccttcaagagtatttccctctgcagaacggggctaataccctatcatgcaaggtgattgtgagaattggaaagaatgcgtgtgcattgcctggtgccttgccatccaaatatattttattagagagagcagcaacatacgcccccccaaccccccgtttaaactaagcgggtccacgtggaatgacgcttttggcgcaagtcggaggagctcctaacgacattagcttctttgagtcccttgggagaggaaactttctgaaagactgtaggattaccttccctgaacttccggtcaggtgcggtgctgccctgccgcgccctcttacccctggatgccgacgaaaccgcaaaactccagccccgggaagcgcgtctcaaggaccaccaccagcgagcggctttgggagagtaatctgcgccaccctcgcagcccattaaataggcactccccgtttgattgacaggagaagtcaccaatgcgcgtcctggggctttccctcgtcctcacgcggggtgagccgcctctctactcatctggcccaatcgggggcgccggggaggctgtggggcggggctcggtgtccggtagccaatggacagagcccagcgggagcggcgggggcggtgcggtcgcggctggcggcagaagcggccgcaggggtctgggcagggctgggcagtgctgccggagcaaaagcggtagcgggagcccggccggagctgggtctggagacgccgtggcagcctgaacggagtgtgcgacggattgggaggtgagtggccgccgaggtcaggggtcgccgcgacggttggggcgccgcgggcgggacgcgggggcgctggtccgcggccgggcccgcgccccgtcagggccgccgcgccgagctccgcgccctgagggaagcgggtcgggccgcgcggaacttcctgtctctgtgggagggggcgagtgctcggggccccggggggcgcctggagaagacatcttggggaggacgagggcgagtggggtcggctcggggaaggggcgggggcccatgggggcggcgctgtgggagcggggcagttttccggggtccggggcctgctggagagggaagtgcaggagcagggccgtcgggggttaagagctgctaatgagtgggggaggtgtagacagctgcagaagggggagctggggcgacttttggagggacgcgatttaggagaaagctgggaatccgagacgtgcagaggttaggcgagggtgccggagcaacgctggagggaaggcgtggctgggacgcgccggtgagagggcagggcttagtcctggggtggcctggggggcgacgcaggacacacgcgggtgcgctgatttcgggcgctttgatgagcggcctccatttccttccttcccaccctccgtgtcccgggggggggggggtggtgtgtgtgtgtctgtgtgtgtgtgtgtgtgtgtgtgtgtgtgtagggcggggggagcaaagcccttaccgcagcacgtcctagggctggggccaagcaggagaggccggggaggtttgcccttgtgaccctcctcagagtttccccagactcactgaatcagaaatccgaactccttactcctctagggctttcaagcctggccaggcatcctgagaggtccgcaattggagaggtagtgattgctgctgctgttgaatttcattgattcattgggtttcggctccatcagagaaggtcgattttcttttcagaaggagttggttggtcaggggagcaagctgtgctattgctttggggcccacacggctgcagcctttgacgtataacaggacctggggatgccactcttggcttgggtgcctgagggaaggtggcctttggctgggtgtgtgcaccattcctggatcctgtcttctctttttccctccgcctgtccggtgtttttgtggttaagggggtaggctgctcagagtctccagggctacttggtacactgtttaccaaatactgcctggctgtcttgatgaaaatcaggaaaccagctcaaagagtttgaacctcagctgcagatggtgagctcacaccttcttccttccctccttttcggtgccttcctctgcggttattcccgtgtgctgaagttctgttttaaccctcctgggattgccaggttggagcccagggcaagggaaccgaccaggcaggcagtgttgaatgccagccctcctgttcttgcccaagatgttgtcgttccacttgattcatgagcctgcctgcatgcagcctcctcatggagacattgaagctgtgccagtgcaacttggatctctcttgattcacctggaaaactttcacttgtgtggacttaaacttaattctagagtttggtagcctctttggtgaggttatgctggttgagatatgaggccactacatcaaaaacattggtgtgtttttcttttgacaatagacttaaagctttaaagaaagtggccattaggctggtgatatttattacttgggaaagtaacataacacagagaagtagatgggtgattaggtctgcactctttatccactttttgggagaagaataacaactcatttgaatggaaatggtatccttagctcgtgctgctttgggacttggaactttatcacttttaatctcaaatgtatatgaagttgtgatgtgatatttaaataatctaggctgggcggggtggctcacgcctgggatcccagcacttgggaaggccgaggcgggcagatcacctgaggtcagaacttagagaccagcctggctaacatggtgaaaccccgtctctactaaagatacaaaaattaaggccgggcgtggtggctcacgcctgtaatctccagcactttgggaggcagaggcgggcggatcaccagaggtcgggagttcgagaccagcttgaccaacatggagaaaccccatgtctactaaaaatacaaaattagctgggtgtggtggtgctcatacctgtaatcccagctacttgggaggctgaggaaggagaattgcttgaacccaggaggcggaggttgcggtgagccaagatccggccgttgcactccagcctaggcaacaagagcaaaactcctgtttcaaaaaaaaaaaaaaattagtctggcgtagtggtgcacacgtgtaatctcagcctcagctacttgggaggctgtggcatgataattgcttgaacctgggagatggaagttgcagtgcactgagatcacaccactgcactctagcctgggtgacagagtgagactctgtttaaaaataaataaatctaaaagtatgcatatatttaaaaaaaattctggatttccaccaacatagcattctgcagggagataacatgaacttttccctaatcctggatacccatccacatctctgatggccaggcatttctggagtgggagcagaggggcatttgtccttgctttttttttttttttttttttgagagagagtctctgcccaggttcaaatgattcctctgcctcagcctcctcagtagttgggattacaggcgcctgccaccttgcctggctagtttttgtatgtttgtatgtatgtatgtatgtatgtatgtatgtatgtatgtatgtatgtatttatttattttgagacagagtctcgctctgtcgcccgggctggaggcagtggtgcgatctcagctcactgtaacctctgcctcccaggttcaagtgattcccctgcctcagcctcctgagtaactgggactacaggcatccaccaccacgcctggctaatttttgtatttatagtagagacgggatttcaccgtgttggccagtatggtctcgatttcctgaccttgtgatccacctgccttggcctcccaaagtgctgggattacaggcacctgccaccttgcctggctagtttttgtatttttaatagagatggggttttaccatgttggccaggctgatctggaactcctgacctcaggtgatctgcccacctcagcttcccaaagtgctgggattacaggcgcctgccaccttgcctggttagtttttgtatttttaatagagatggggtttcacagtgttggccaggctgatctggaactcctgacctccagtgatctgcccgcctcggcctcgcagatgtccttgccttttgtttcttctctataccttgaaagtctgtgctgtgttaagggcgtcatgctcaggcttactgattctgaaggggttatcagtggatgattccggatgttgtggaatatcaaacagatcgaaaagtttctttaataatagtgatggcaccttgtgtttagagttcgcagtggcatttaccagatgctctctggccaccttcatgtgaacctcccagctgactcgggcctgctttatctgccatcagattgtaatggcagctttgtggaggccgccctgtagattatgcgattaatgaccacattcatgtgagcaatagtgctggcttagtttttttccagttaggttgtttggaatggtagctgcatacctgagggcagtgcagcaatgccttagttacgaaggcagtttgcattccacaggtagagtctttccttatggccagggcactgatccctcacataccagaaagtatcattcgtccctgccccagacagactccagatgcgtcccagtggtggttcttgggatagttttgtaggaatttctgcagaattttagtgttcagatgagtatgctctgtctgtggactggagacaggcttcaaagaattctcaaattattctgcacaatacatcattttttggtatctctgcagttccaaaggtaactacttgagggacagtggccaccaaagagcacaagttttgacattttgatgaaaagcacacataaaacaaataaaaaccacctttccttaagttacctattgaattgtgcttattcccataaatgcatgttcatctgtttgcttaataaaacttaaagcaccatagagtctttcttgtttcctagaataaggtcttttttcttttcctttcttgtctttttttgttgttgttgttgttgagacggagtctcgctttgttgcccaggctggaagtgccctgtggtgtgatcttggctcactgcaggctgcgcctcccgagttcatgccattctcctgcctcagcctcccaagtagctgggactacaggcgcccgccgccacacttggctaatgttttgtatttttagtagagacggggtttcactatgttagccaggatggtcttgatctcctgaccttcgtgatctgcccgcctctgcctcccaaagtgctgggattacaggcgtgagccaccgtgcctggccggtcttttttattttcaattaaaaaaaaatatatatatatatgtatttttaaacagagatgggattccgccatgtttgccaggctggtctcaaacccctggcctcaagtgatcctcccatctcgggttcccaaagtgctaggattacaggtgtgagctaccacacctggcctattttcaatcctaaaaaaatcatttgcgtgtttcttgattttaggcactgaactagacggagatgagaatatagaaataataaaatggggctgggcgctgtggctcacacctgtaatcccagcactatgggaagtaaaggagcagatcacttcaggtcaggagttcgagaccagcctggccaacatggtgaaaccccatctctgctgaaaatacaaaaattagtcgggtatggtggcgtgcgcctataatctcagctactcgggaggctgaggcaggagaatcactagaacccgggaggcagaggctgcagtgagccgagattgtgccactgcactccagccttgggtgacagagcaagactctgtctcaaaaaaaaaaaaaaaaaaaaatagaaaaaataaaatgatgtctcaactatcaaagacctcgcaagaagccttaaaaatgataaataaggctagagattttgctgtacctttggaaagtgcatgtgtggtggtttatagtacatattctgtggccagataaaatttatatgattatttttcctcccaagaatatgagatgacagagggggaggagcgtggatggagactaggagccttgggctcttgtccagcctttccctgaccaaccctgaggtctgggacaatcagcacagaactccaggtctcagttttcatatttgtaaaatgaaggacttagaggaccttcaccttttgcaaatctgatagcaactgtgaccccttcccacgaagggggacagcttcataggcgtggacccagattaagaactggattattccatctctaagctccctctcacctgtgatattctgtaatcctattttcctggtcatctttgagctaataataatgatgacttgtatttatagaagatgcacattccaaagcactttcacctctcattcttttgtcctcaaaacatttctgagtggtacaggtggcaatagatattccttcctgtgatgaagaaagtgggccaggcttggtcagcacgttgatggagcaaacagccagaggccgtcctgggaccagaactggggctcctggttgccatcctggggcttttccattaggttttgcttccttggtggttgtcattatgagttatgtttggcagttcaaatatcccagaatgtgtcactcgtagaggaaactatttgttcatctgccggaaaggactgtttttctctctgaatttggatcactaaacaccttttctgtatgtgaaaaggctacttatttgtttttgttattttttcttgccacatttttcatagggacagtttgtagggcttgagtgttttgagcagacttatttaatgcttattgatgaaagagtacattaaaatgactacttctcagttgcttagcacttgagaaagttgtgaaataaatgttaagtaaaaattccaaatgtctcacttgtcctatccaagtatgtcctcacagatgagatgctttctgcagtctaggaggcccctccctgggcccagagccgctgggtgggtttgaaagttgggtgtggattgtgccagtggccaggactgtccaacagtggctgcttgtggccttctggctagattcctaacattttatggactaatttttttggtttattgaaagagtacacattctgagctatataaagagctcatatatgtaaaagaacactgaacttaggccgggcgtggtggctaacgcctgtaattccagcactttgggaagctgaggtgggcagatcacaaggtcaggagtttgagaccagcctggccaatatggtgaaaccccatctctactaaaaatataaaaactagctggtcatggtggtgcgtgcctgtaatcccagctactggggaggctgaggcaggcgaatggcttgaacccaggaggcggaggttgcagtgagccgagattgtgccactgcactccagcctgggcgacagagtgagactctgtctcaaaaaaaaaagaagaccactgaattttagagcctcacagatgttaggtggcttatttctgatgaaaataatcataataaagatgttttttatttttattttttaaaagaatacttctgatgtatttctgaaagctgttttgaatactcagacatggaagctgatagtactgcacacagcaggcatcactcaatgtggagtgtgtgtggagaatccacctgtcttcctgttatgtcatgtgtgatgtgactattgatagagttgcagccagctggggcactccattaagctgcccgtggaagtacctgctttttattttcatttcactccctggactgagagtgtttggaggatatctcagtggctcatgtggagggagcatctgtgggtggaaggcaacaggcagggtgagtcagaggtagtggtcctggccactgcatgcctggtgcccctggctctgcctgcagctctggaatcctgagataaagatgatggctgctctgtaaaggcagctcagtataggcagcaggcctggaaacttctcttttcattgtggcggtaccagatagtagtgtgtacaaagtactgcacgacagaggagggcgggtctgactgtcctcaggacactacagagagctgaccttcagggaagtgacttgggagggattgtgccagagccacaggtgctctccaggtggggctgacgtgaaggaccattctgggcagagctacagagctctgaagaacaaggagtggctgggagagaggggtcacgcctgtaatcccaacactttgggaagctgaggtgggcggatcacttgaggccaggagtttgagaccagcctggccaacatagcaaaaccctgtctctactaaaagtacaaaaattagctgggcgtggtggtttgtgactgtgaacccaggtactcgggaggctgaggcaggagaatcgcttgaacctgggggcagagattgcagtgagccaggatagtgctacttcattccagcctgggtgacagagcgagactgtctcaaaaaaaaaaaaaaaaagaacaagaggtgtgtgtgagaggggctgctaggggcagggaaggctccaggttatgacctgccttatattctcctggaggacagttcactggggagcagtttctgggtatttaaaataccgggatgaagatcttcagagaagcaagatgtcagttgagaagtcagggatgcagatgggggaggggtgattcaggtgactcaatttcacaaaggtcacctctgtctctgggagtctcaaggattgccatctgtgttcctaggaagcagtggctccactctaatgagaagggcttttcgagtgggaatggcctcagccttgactcattctcttaacctgcatttacgtgtttggttgagaatgcagtagctgtgtgggttctgcttctctttcttttttcttttttgagacggaattttgctcttgtcgcccaggctggagtacaatggtgcgatttcggctcactgcaccctccacctcccaggttccagtgagtctcctgcctcagcctcccaagtagctgggattataggcatgcgccatcatgccgggctaatttttgtatttttggtagagatggggttttaccatgttggccaggctggtctcaaactcctgacctcaaacggcccgcctgcctctgcctcccaaagtgctgggatttcaggcatgagccaccgtgcctggctgtttctctttccatatggtttatgcttacagatccttgaggttaatatgtcactttcactgttagttcctacagaagaaaggtaattttgcaataaggttttggaggttaggaacatggttttggagtcatacagcccttgggtgtgggttcgagctccatcactaggtgactgtgcggcttttggccaaatgtttcaatgtctccaaaacttgagtgtcttagtcagttggggctgctataacaaagatgcggtggcttgtaaacaacagaaatttccttcttacagttctgtaggctgcaagtctgagatcagggtaccagcatggttgggttctgaggagggtcctttttcatgttgcggattgctgacttcttatagcttcacatgacagaaagaaggcgagagagctctcaggtactttttataaaggcatgagtggctgagtgcagtggcttatgcctgtaatctcaacacttttggaggctgaggcaggaggatcacttgatgccaggagttcatggccagcctgggtaacatagtgagaccctatctcaacaaaaactaaaaaaaaaaaattgtaaggacactagtcccattcatgagggccctgcctaattagcttccaaaggccctacttcctaatgccatcaaactgaggggtagaatttcaacatatgaattttgaggggatccatacatgcagtcctttgcaccaggatactgagagcccttcctcataggattttggcggggcagcatgaggtgatggaccccaggagcccagcatgtgtgcctggtcacagtgctcattcagtcactctcctatcagtctacgtaagtgaatttgccagcaaactatacctttaaagtgcccaaagtgattttatccagttctatttaaaaatccttccagaactttttggacctttccttggtgactcggggtcacgggtgtagtcgcaggtcattggtgtgggtgaggcctcctgccctggccctgcatggactcccctcatatcctggcacttacagggcctgtctttctccccaccaccttttgtaagctgctgttggcacctggcccttttgttggggtaagggcctgatgatggtcatatcctccctgggttttgagggcagccttgccatgcagagaggccttgctctcttctgggttggtaattctctgcctgagtttaatgtgatggattctagaaagcctgaccctggggtgaagggatgttgcttgactacacgtagtgactcaggattggaagggagtactggtaatgatagcttatccctaggtgatgggaaataggacttagaaagcaaatgataaaggtgtgagcactgctcacctgtgtgaaattgtattaagataacacgcagcagtgatagttaaggctttagaattataggaagtttctccttgttttccacacagtaccattgcccttttacttttagattaatgtttaagtaataactttgtaattaaaataagtataaataaaaagagcttggttgtctaggcatttgcattttaccaagaagctttccatagccctcattttgttttcaggacagccttgttgatttgtttcccttttcattgtttagaggagaaagagagtcagagctaaaggggtgagtggttttgcctgaggccacctgccaggaccccatatgggcctctgagcccaagcccagagcgcccagggaggcctgtgacggggcctctgcctggacctgcagggtggtctttagataggatcaactgtgtattctgaagtttcctattgaatgaaatgaaatcttcttaatgtaaagtgatacccaaaccgtagtttgtgagcattttcatgttttaaactgcatttgtctttcattatattaaattatgttgtcgccaaccgagcgtgccaagatcatgaattgtggtcttcagaggaaccacagagcaggcagtgctccctgtacagacgtccaagcccgctattagtgggttctgtagctgtctgattggctggagctggctgcctgctcgccacttagctcgcacgtggtgatgctttaattaagcaattgcgacctttgctcctgcaaatgtgtcatcagataaggagactgggcatgtgccaccaaggaggatgtgcgtggggggtgcagagtcagtggtgaggggctgtctgcacaggcccccatgttctgaagtttctgagggaccattcaagaagctttacattcctgcccatttaattcttgcaaccagatagtgttctctccacttgatccatcagtaaacctaagctcagagagattcagtggccttcagagggtcaccatcagagctggtgctctgcctaccgaagcccacactcatttcacctcctctggctggctggaataagtaagttgtgaatcactctcagatgtgaacatctttaaaagataattaatctttctcccccacctctgagaaacatagacatgagggagattatgtgtgtcctttgcttaagacggcatctatgtctgtaactaacttggtttcaataatctgaaagtttacaaccatttacacagcagggagataagggcacaaaagggagagctgctggggtgcggtcaaggccgtgggtgactcgctggtacacccaccccatgatgcatcccacgtgggacaggaggaagattccagaggccctggcttaggagtgcctcatcttcggcagatgcattttaaaaggcatcttatgctgttaaagagcaggtagacaagggagaagaaattgtgtttctgtagaggactgcactttgtaaaattgcgaaaggtcttcacattttgtcaacgttgtgatatcacataagagcatttgctcaggtatattagagcagatatttgttttgttttgttttattttgagacagagtcttgctctgtcgcccaggctggagtgcagtggcgcgatctcggctcactgcaagctccgcctcctgggttcacaccattctcctgcctcagcctcccaagtagctgggactacaggtgcccgccaccacgcccagctaattttttgtatttttagtagagacggggtttcaccgtgttagccaggatggtctctatctcctgacgtgatccgcctgccttggcctcccgaagtgctgggattacaggcgtgagccaccgcgcccagccgatatttgtttttatgcttgggataatcatcacttttgtgtcaaatgacttcttttttgctttctttaaatcttttaaaaattgaaggttcaacatagaaaacaatgttctgagtaaaaaactctttgtagtttaccttccacgcacaaagtggtttttgtgtatcttgatcaagtaacctattccctgccaactttgtaccaagcttcagaagaggcaagagaggtacgttgtctctgtcctgcctcaaggcaacacttcgaggttgttagtttgaatgtgaggaagctgtaggtagtgagatcaggtgcctagttcaaggccatccagtttgtagatgggagagatctggagcttgaactgacctcgctgtttccttttcaataactgacattgttataattgtattattcagattcacttaaatattttctcaagtattttccatgttttaccttcatcttcaaaaagattattaatggttatattatcctgttgacgtaatgagattaaaacattccctagtgctggacattttaggttatttccacttttttgctaatgtagatgaatttgcagtttataatttcatcctttttcatctgtgtaattagttcctggggataaattcccgagaatagaaatcttgtattaaagggtatgaacaccttaagagtgttttgaaagcctgtcttgctgcttgtaagtgtatttttctgattttttgggtgaaaaaatggggattctttctctttaaagtgcctgccttggcctttagaacttccaagtatctgtgagataagaaagttctgtgagggtttcttaaatgagtcacatttccttcctaagtttctggatatcattttacttgaattggttgccatactttgatgagcaaggaacgctgttttagaaaatccttactacttgatgattaatccttggagctaatgttccacgttcccaaggttgtgagtgcttatggccacattcctgcatcagctcagccatcgcggtaggtatctcacagaccttctctagctttcttttcctcacttaagggatgcatattggaaagactctgcagggttctttctgccaggcagcctgggggtcgtgtggtcctttagagttcatctctagcttctagatgctgctctcatgggggttcctggctctgttcatctccagagacaagcatctcaaagggaacctgggaagtttatagcactggtgcttgcttgccttgtttgcttgtttgtttttctgttctggtctgctgtggaacttgtcaccatgtcccctccccatggactgactttcctaccctccactgtcccttaggtattcactctcagactgagtggtgtcctgttttcctggtggctcatttgccagggtctgcaaaggacaaggtgcttagcagggacagagaggggctccaggtggggagcagtggtcaggccagctgaccttagtgcttacccctgggtcccctccctagaattcctgcgatgcctccaccatgtctaccctctccccacaggggctgtttcccttttagttctcttgccttactgtgggcaaaagcttacttttcttggttcctcttatcccagctaagaaaagctgatgttcacaacaaaatgaagagacttgactacccaggaaggtagacataagaggaaacagccacaaacagcacaggcatacaagtgtcttgcttcccaagcacaggcaggtttttgtgcccacacttcagggctcgtctgactgcactggctctgccaggcgctgcccagcttcctgcttcccctcccagtcctgcttcttctgtcagtaaaacaaaattttagagtgatgctttgcttgatgctttgggggctgcatttttatcacaagtgtggaaattgtactttgctctggtttctacagatgcctaaacatgtctaggttgctgttgccttggcaactggctgagctgttggttgtgtgtgtggtgaaggttctggcaggggcttcatggaagcctctggtcatccttagagcttttcagctaagctggcggttactcccaagcccagaaccatatgctcttagctcccctttgtcgtttggagcttcccattttatttccctgagaaatccctgctcagctgccctagacttgggtgggtggtatggcatggcatggcatgcactgatagggctgatttatttcgagactggatttttggtaacacaagacgtgattccatagcagcccttggcctaagttttatttgaggtcggacggggcccaagggctgcttgtgctctcccttcaagtgccttctgctttttaggcctggggtgcttgttggggcccagagctgggccttgcctgagagtcacgcaaaagcagggccttccagtactccagaggggtactcctgaccacctgtaagccatgggaagaaagtcaatgtgattggatcacggcagtgccacacagtatgtctccttttatgaagactgagtgaaaggatataatcaattccagttttatcctttgttattttctttaatgcttcttgtatttccttttggatttatttcttttcttcttagtcttgcaaatgtgagtctgaagttgctgatgtgggggttggggctgactcatcacctccccttatagctcagacaagtcaccttccttaaagttttttgggtgtacgctcatttccagaattgctattttgggcccatgcttttctctctgctgcctctactaggaacttgcaggttcacgaaatttagaaatagtttaacataacatgagctcttactagtaagtaaagaggtgagtagagagagaaacctcctccaatcctccaaaccctccaaaagcctcatgttagcagtgtgattggtggaggtggagacaaactcagtccattgggaactcgtggggttaccaggtgggagaggggagttctctccttggggtagagttggcaaattaccagtccccacaaaggctgcaaagccctgctacccactccctgtgcatcctgctgtccaggatggctggcttttggggtcctgacctggaacccgggttgcttttccccataggagggcctctgtctggagcagaggttcagggagaagcctctggcatgttttggtcttgggccggccccgtccattggggctacaagtgcctgcagtgagctgttgttagtaaggagctctgcaaccagattgcctgggcttgaatcccagctctgagattggttgtgatacctacctcacctttgaaatggggatcatgataggattgttgtgcagatgggatgcatgaatgtgtgccctgcacttgtgatggcattgcccttagagaactccattgtagcacagccatcggtgcctctgagcctgccaaccatcttgccttgggactctttgattcccactttacagttgaggaaataggctcagagaagcttaatatatcttcagatctgggtctgtctcagggttctctcttcaaagcactggtggtcccccacagtggccctgtctccccagcaagttagggagtgactgccaggggactgctccatcagtcctgtgcccaccaggcatagtctgtagacagcatttttttttttgagatggagtttcattcttgttgcccaggctggagtgcaatggcatgatcttgtctcacggcaacctccgcgtcccgggttcaagcgattctcttcttcagcctcccaagtagctgggattacaggcatgtaccaccacgctgggctaattttgtgtttttagtagagacagggtttctccatcttggtcaggctggtcttgaattcccaacctcaggtgatccactggccttggcctcccaaagtgctgggattagaggcatgagccaccacgcctggcctgtagacagattttttaatgcctccgtacacacacatacacacacacattagacatttatatgttactgaaatgggagagttccctggaccccttcgaggtacttgggacaggggtgtggctggtttgcttaaaccacttacaggagggggagcatgcaggtgagcaagtacaggggccgaggcgagcacttttgggctctggccccacagcagtgtctagggttgttacaatgctcttttagccctcctgtctgaggacggcttaagtgttaaacggcttaagagtcagtgtgacagcctttttgggttcagcatcccgaattatctggcgtccaggaagaatcaggtcacatggacttgaaggatggtgaatgcgggattttattgagtgatggaggtggctctcagcaggatggggagctggagatgggatggagtgggaaggtgatcttttcctggagtttggccattctgcagccgatctcctcttcaactgcccccagctcaactcctctcgacttcctctcttctctcctctgccactcttctgctcctggattctggggtttggggttttatatgggcacaggatgatgggggacatggtgggctgaaaggcaacatttgggtgcgaaaacaggaatgcttgttctcatttagggccttgggtccaggcttgagggtggggctctcaccagggaccctgcccttctgcctcgtgtttgtatcattactatatataaatgatgctgtgattatgattaacaaaataccagtttactttaaaacttgaatttacagtagccttttgtcatctggagtttctaaatcattgaatgtgaaaaatactattatttagggatctagcaaccttattgatctttaaaaggcttaagttcagaaaaagtttattgttgcccttttcttgctctgtgttttggtgtctgcccttctgtctgtctggcatctgtgcgagtcatgcgtcagggcatgttggggagatggaggccagtgtggctgggttgagttataaactggaagcaaggttgggagcccagaatccaaaccaggttcagactgggagaatatctgaaatccctgcagcagcaaagaaggttcctatattcacggtccctgaaggaattttgctgggtccccaggttctctgggagcattgatgtgtctcactctcatggtaccaaagactttctgtttttattcatcaacttcctgtatttccttctgctccctccttaacctggggttggctctagtttcaaagttaattctcaaatccaaacctcagacttaaaggctggtaactgcccttggatatgtttggggctggctcctgagaaacctcttttccaggaaagctctggcctgttagattttgctctgtaattttactgccttgctcacctaacggtggtcactggtgttctgagacacgtgggtggaactcagcaatgtttcttcacttgtatttttgtttgtttgttttttgagacagagtcttgccctgtcgcccaggctggggtgcagtggtgtgatctcagctcactgcatcctccacctcacgggttcagatgattctcctgcctcactctgcctcccgagtgaagtaatagctgggaccacaggcatgcgccaccatgcctggctaatttttgttgacctgtatttggatcttatatttacatgagaatttcatgcaaatagattctttccccctagaaatggactcagacatttttgcatgcaattcaatgtattcataaatccccattcatttttatttatttatttattatttattgtttttttttttgagacggagtctcgctgtcgcccaggctggagtgcagtggcgccatctcagctcactgcaacctctgcctcccgggttcaagcgattctcctgcctcagcctcccaggtagctgggactacaggcgcctgccaccacgcctggctaattttttctatttttagtagagacagggttttaccatgttagccaggatggtctcaatctcctgaccttgtgatctgcccgcctctgcctcccaaagtcctgggataacaggcgtgagccactgtgcctggccaaatccccatttatgtattcagcaaatttttgaacgcctgccatgtgctaggcacggttctaggcactggagttacaacaggaacaacgtagtccatgatcttacattctggtcagaggaggcagagcgtgattaaacacccccagcctggtgtggagggaaggccagcctcagtgggcgggagggtccaagcctcatcccctcctgccagggctctgcttgttgccaaacctcccagcccccttctagccttcacttccctgaactggtttctgacttcacaatcgttatcagaattatttttaaaaaatttaatgtttattgaggctcattttgtgccaggtgtcctatttttccttgcgtgattacacttattctcatgacaactttgttttgcaagtgagaaagctgggcctaggcctcatacctaggaaatgtgatgtgtggttttgatcagcatgcagcttgaggctgtagaactcagtaagccaggcctgaggacaccatcagaaataccaacaaaaaattcagtgtgtccattttggcctggaccgtctctattctctgctttttttccccctgattgagacagggcctcactctgtcacccaggctggagtgtagtggtgtgattgtggcccactgcagcctccaactccagggcttaatgatcctctcacctcaccctcccaaattacaagtgtgtaccatcatacctggccaatttttttttttttttttttttgcggcagagtcttgctctgtcacccaggctggagtgcagtggctcgatcttggctcactgcaacctttgctgcctgggttcaggcgattctcctgcctcagccttcccagtagctgggattacgggcgtgtgccaccatgcccagctaatttttgtatttttagtagtgatggggtttcagcatcttggccaggctggtcttgaattcctgaccttgtgatccacccatcttggcctcccaaagtgctaggattacaggcgtgagccaccgcgtccagtgtcatacctggctaattttattattttttttttgagacggagtctcgctctgtcgcccagcctggagtgcagtggtgcaatctcggctcattgcaagctccgcttcccaggttcaagccattctcctacctcagcctcccaagtagctgggactacaggcgcccaccaccacgcccagctaattttttgtatttttagtagaaatgaggtttcaccgtgttagccaggatggtcttgatctcctgaccttgtgatccgcccacttcggcctcccaaagtgctgggattacagacgtgagccaccacgcccagccaatacctggctaatttttaaatttttctggagactggggaagggggcaggtctcactgtgttgcccaggctggtcttgaactcctggcttcaagtgatcctcctgtcccggcttcccagagcgctgggattacaggtgtgggtcactgtgcctggccactgtttcttttaacaatcaaattgcctttctcaaggaggaaaacatgggtggaatgtgctttaaggcctctgtctggtggacattataggcacttgaagttaccaaatctgtatatttactgttggcaaaattgcatgatcccatccttatttccaaataattgccgcgtgaatgacattggaaatgcacatttagttcttgactgagtagttgtatacacactctggtttttccacaccagacacttgctctcttgctgtgacttttaaggtcctgcccaatggacagagtaacttcctgaaaagttgctttaaaaaccttgtctcctcagtggacggagggtgcaatgaaacaacatttgtcatcctgactcagtcccaaccaagcagaacctttattgtgactggaggtttgcaagctgccgtcctcctggcaccaaaagcagcctgttctttaaatatttgcattgaataactttgtagctctgcttccttctaaggcttgccacacttcatgtcagaagcagagctcctcctctggagttattgtgaaacatgactgaatgccagggtgcagtttctctgcagtcagctcactttatagaggaagaactcggctgcttcagctcaatgtgagttaaacgttgcagtgtccagtcttgcttcctggcagttggggcccggagcagccccgaggcggggaggggggacattgtcccctttgactatgtgattgttggaagcagggtcctgagagggagtccaggaggcagcctaaatggaatttccagtctaaacgggcaaggcacagttgcgggagtcctggtgtaaagtccagtgagacagagactggggcttggggtgggatggggattgctgacaagagagaaggatctctgggccagggaagaggcagctgcattcgctggctgcgaggctgtggctctaggtgtggatatgctagggtgctccccgcagcccccagacctttcatatgtcagcattcccgtaggtggggcatgtgggacccctgcccggggccctttttccagtgtgactgtccctatagggtgaggaatctgaggtatcaagaagtggtatctccctaaaacttgtgcctctccctttaggccatgcacagggacagagaccctggaattccctgccccagtaacccccagaccccttacatggcctgcatgggccgcctccctggcgtgtcctgctgagggtaggctgtgcactgtgtgcacgtgcctccagccaaaggtggctgaatggtggccatgggcagggtatgtgtggacagagcttgggtgtgcaggctggggtgtccccataagcacgcccgagggtctttgtggcgcaggacacggctctggattcatgtgtgtgcctggtttcttgaatggtaaagttcatgcttattttctgggtgtgtttggggttgtccctccctatctgacacatggggcttgggaccatgcctggagccccagttgcatggggaggtggggttaagagcaggcctgtccccctgctcagcccttcttaccaccaaaccagccacacttgagcaggagcgcactgcactgtcattttacccaaagtttccctctagggctttgctgatgacatctcttggcttttgttagcattctggcgcaatatcagaaggattccagtctacatcgtggtcttcttgagagctcatatttgatttcggctttagctcactggactttagcctggaggaatcccactgaagagtttttaatgttgacttatggaacttgtcccagcagcaaaccacagatactgtggcttgggggtgagcagctcttgtggaaacaaggcacttcccttcttcagctgcataggagtgcttcaggaaccttttgggccacattcttcttgtgatttcttgacttgtgggagggcagggaagtgatgtctgggtcccacagcgcacatggctgtccctggtgccgcccttccaggaggaactgccaggtcggatgtggagatgaacccggagagtgtccttcggctctggtcggccttcaggggcattcctgccagtctcagaagatgacagtctgcaatcgtgttatcatcaacgtggaaaaaataagggcaatgcagttttcatgtgtgtaaggttagcagctgccctttcttgggaagggctctttctgtataaaattttgaccattgtatcttttacattttaaaatgtcctatctttccatgttgatgaaaagagctggtagtttctaaaggatattcttacttggcaaaataagaagtaagcagtcttatgttattctgccttcaaatttgaaacagttttattgagttataatgaacaggcgataagttttggcatatgaatacactgttaagccatcattgcaaagaagatagtgagaagtccaccctctgagggttcctcttgccacttggggtccctctgcccccacttcttccaggccaccactgctctactctttgccactgtagaatcatttgcattttctaaaattttatgtaaatggaatcatacagtatgtattctatgtattcttcttcttccttttttttttttgagatggagtcttgttctgttgctaggctggagtgcagtggtgcaatctcgactcactgcaacctccgcctcccgggttgaagtgattctcctgcttcccagctcccagctcccgagtagctgggactataagtgcatgctgccatgcccggccaatttttttgtatttttagtagagacggggcttcactgtgttgcccaggctggtctcaaactcctgagctcgggcaatctgcccgcctcagcctcccagagtgctaggattacaggtgtgagccaccacttccggccagtatatattctttttacagtatgtgttatttttagtctggcttctttcactcagtaaaattactttgagattgttgtagcatttatcagttagtttcattttttaaaaaatccaatgcatgggcatgctacaatttgttcattcacctattgacagacgtttgggctgtttccacttggtgtaatcacaaatgaagatgctatgtcgtgaaaagatgttacagaaaaataaggtgctattaacatttgtgtgccagtctctgtggggacatctgctttctttttatcaaaaatttaatggagacagagtctccctatgttgccaagactgatcttgaactcctgggctcaaatgatcctcctgcctcagtcttctaaagtgttgggattacaggtgtgaaccactgcacttggccaacatctgcttccacttccctggggtaaatacctagagtggaatggctaggtgctttggtggtttaggtggttaggctaggtttggtggctagggtacgtttaacatgtccagacactgccaaacttttccaaagtgctttgcgcgcatcaccagcactgggttctagttcccccacatcctcaccaacacttggtacatgtagtctttttaatttttgccattctggtaggtttaatttgcatttccctagtgattatctctttaaatcacttgcctgttgaaaaagctgagttgttttattaacttagttttgaaatttttaaaatatattttggatacaattccttgatcaattacataatttgaaaatattgactccctgtctgaggctgtcttttcattcttttaacagtatcttttgaagaacagaagttttaaacatttgctgaagtcaatttgttcttttacggcttgtgcttttttggttggtgtcacagctaaaatctttgcctaatcccaggtcacaaatgttttctcatgtctcgtctagaaatgttatagttttatgttttacatttaggcctgtgatccattttgaacttttaaaatgtgttgcggtgtgtgaattgaaggttttttttttttttttttgtctgtggatagccagttgtttcagtaccatttgttgaaaagtccccaaaattttgggggaaaatttctaattggtgaaacccagaggtctgggaattgtggttctgagcccttggatctcttcatgactgtttactgttctcagcttcgtatggcatggctttctctttatcgcacctgggagttcccagctcctgacagcaggagctctatcattggatagggctgggaaagggactgggcgatgcccgctggattcccgcacagtctctctccttcttctctgggccatacagaggcttctggttggtgggttctgggcagtgtctcatttccagaggtgactagaggcttgccaggacagagaggtggagggagaagaagccttctgtgcctggatgggtggggtggggctcaggctgagaaaggtgggaggggctgttccccattctgcgagggctgacagccttgagacctgcagccagctgagacccagggaactgggctctgctctgagccactgcttgtccttgaccagctttatgactggggtggatgggggtgggaggggttaacacaagttcattcttttcccttcagtcacaaagtggctctgagcagtctccaagtctataccattgtacagcagcttcctaggaggtggtaaagtctccatctgctttttgatctgggggcagtgtgttctgactcataaactgctggtactactagtcctagcactaggagttccaccagcacctaaaagtgatggagctttcttctgctgtaagcactttgtgtatagaacccgttgagtcctcacaacagcgttgtgaggtggctgctgtccattttacagatgaggaaactgaggcacagagaaggtgaccatctggaagaagtctttgggctgtgctttttgttattgaacattgaaggacagatatggtttagcatttttcattagctcttgagccaaatagagtggtttccatggccctcttccacatcttcatgttcttattggcaacggggaggggtcggactgtctgagattaaaattcttgagtggttctctgttgttatcacaataaaatccagacttgtggtctgacccctgcttacccgttgagtctcatctcttgccacactcctgaacttcttgcatttctcccatgcaaatcttgtctactgcaaatgccattcttcccgtctttgcctgctgaactcatccttcaaaacttggctctaatttcaccttcccctccctccaggtgttttgcccctgggcctgcagagtggatggtccacccccgtccccatactcctcatgtatggtatgaccgacctgtttgtcttctgtggggctaggagctgggtaggcggagggcaggggactgcattttgtattgtagtgtgcagttcttagctctgaaatggcacatcataggcaagcaggctctgtgggatgaacaatgcaggcatgagtgacatgaggatctgcagtcctaagactgattcattctttgggaggagtatcccttcttacccaaagccagttggtttgtggccgtctgtgattgcaagtgcccagggctgccctcatgtggaaagtcacgttgactgactgcagaaattagctgtgtttaaaaatcattctttttaaaaaaatcattcattttttaaacctgtttaaatgcttgaactggcttacatcttacatatatacacacacatatatatacacacatatgtgtgtgtatatatatatatatacatatatatacatatgtgtgtatatatatgtgtgtgtatatatgtatatataaatatatcttctttttttaaacctgtttaaatgcttgaactggcttacatcttacctatatatacacacatatatatacatatatgtgtgtgtgtgtgtatatatatatatatatatttttttttccccctccaagagaatgagttttcttttcttttttttttctttcttgttttgtttttttgagacagagtctcactgtgtcgcccaggctggaatgcggtggcgcgatctcagctcactgctgcaatctctgcctcccaggttcaaatgattctcctacctcagcctcccaagtagctgggactacaggcacccaccaccatgcccagctaattttttttgtatttttagtagagacggggtttcactgtgttggccaggctggtcttgaactcgtgacctcgtgatccacccgcctcggcctcccaaggtgctgggattacaggtgtgaaccaccacacctggccttttttttttttgagggggatggagtttcactcttattgcccaggctggagtgcaatcgtgtgatctcggctcactgcaacctccacctcccaggttcaagcgattctcctgcctcagcctccttagtagctgggattacaggcatccaccaccacacccagctaattttttgtatttttagtagagatggggtttcatcatgttggccaggctggtcttgacctcctgacctcaggtgatccacccacctcgcctcccaaagtgctgggttaataggcgtgagccactgcgcccggccgagaattgagttttctattgtattaagaaacgaactagaccaggtgcagtggctcatacctgtaatcccagcactttgggaggtcaaggcaggaggatttcgtgagcctaggagtttgagaccagcctgggcaacatagtgagaccctgtgtctacagaaaatttaaaactagccaggtgtcatggtatgtgcctgtggtcccagctattcaggaggctgaggtgggagagttgcttgagcctaggaagtcaaggctgcagtgagccatgattgcgccactgcactccagtctggatgacagactcactcccaaaaacaaaaaaaaaaatttctttgaccacctttcagatcatggatttaagtttctatattttttcccaaatgcatgtgatgtcattgtaaattttatggcaagctaaaaaaataatttgagtttttgaaaatgtttctttggaatgtgtgggctggggccaacatgaattagattggatcaagtttggtatcccttcttgaaagagaaggaagtttggagagcaatgttaactgaactgcatttggtacagagagctatttagaaatgttttgctacatttcactgaaatcttcatacctgtggctacattattttcttcccgagctgctgtagttaggagcagttatacttttggccagtggaccctaagcctggacttctacaggttgctgaatttgaaccagattttcagttcattgcataatgtatttttttctttaattactaggacgcaggattaactaatcttgggaagtagaaggttgagttgtaccttgatgaagatgagttcaagctctatttggttgtggtcctctcctgctctggccatgacgtgccccccacccctcactcacacatcccacagctgtctgtgtcctcgtgggctttgtaactgtgagggtcctagcagtgaatgtgaatgaaaagtgttcagagactatcttctccttgtctttggtgcctgggacaaacctacattttctaaatggttttgcttttgtgttctctggaacaggcatttatgtatttatttattttgtttttgagccacagtctcgttatgttgcccaggctggggtgcagtggtgcgatctcggctcacagcaacctccacctcccgagttcaagtgattcacctcagcctcccaagtagctgggactacagggatgtgccatcacacctggctaatttttgtatctttagtagagacggggtttcaccatgttggccaggctggtcttgaactcctgacctcaagtgatctgcccgcctcagcctcccaaagtgctgggattacagacataaaccactacgtccagcctggaacaggcattttaaaatgtgttctggaggttttatggctcatgcctgtaatccgagcactttgggaggcggaggtgggtagatgatgaggtcaggagattgagaccatcctggctaacacagtgattaaaccctgtctctactaaaaatacaaaaaattagccgggtgtggtggtgcgcacctgtagtcccagctacttgggacgctgaggcaggagaatcgcttgaacccgggaggcggaggttgcagtgagccgagattgcaccactgcactccagcctgggtgacagagtgagactcctgtctcaaaaaaaaaaaaaaaaaagaatgaatgtgcccgtcttctgaacatggtgccatgggtgtgtgtgtgtgtgtgtgtgtgtgtgtgtgtgtgtgtgtgtgttgctcctggactcagggtggggtgtctcaaaccacatgctgggtggccagtgaggtccctcgggcagagccacctgcgtgtaggggtgtcatcttatctaggggctggagatgaaatttttatctgtgggaagctaagcagcccatataataacagtgatgatcagtgttggggtacccaaggttagtgctgttatcacttttttacacataaatgaaatggaggctcagagagatagttaaaatatttgttcagggacacatgggtggtaagtgacagagtcagggtttgaacccaggtcagtcttggtgttttgtgtatagattcagacacaccccccagcaagtcatcaaaaatgtcttctcattgactacacatcaagggtgggtggagtggactctacaggctgtctgaggggtgttagttagggaaggcgtcagtgggaatggagtatctatgtatgtgtgcgtgtaggtatgtgtgatttacatccaataaactttactcaagaaggggatcttaggggctttattatataggcagtggctatcaaaggcttttaagcagaagagaaaggtgagaccacatctaggtttcgggaaggtttttttagaatgggtagaaaaggatagagattagatctagagagacaagtgttgatgcagtagctgctgccccttcttagggtctttgcacgtggggttcccacttcctggaatgttctttgtcttcaggtcatagcacaaaagccccctctcagtggtcactgatgttgctctctgccctgaagtagccctctgctgtgtctgaagtcattgtgttcccatgtggattttagtgtgtatcttcaccccccattagagtgtcactgtcatgcatgtgcactcagcagcgtgcagggccccaaaaggcctccgtgaactgtggaggaatgagcccctgaagtggcgggtggtgagatcgagcctgtctgctggttgccatgctgggaaggggttgtggagggagaggggaaccaaggtcatttcttttaggcgtttgatttcgtttggccggatgaatgctgcccttgattgatactcacgagtgttttctttgggggccgctgcgcttttccaaacagccagggtgcttaccagactcgctgaccacactgcagcccagcgtcgtggctgacgcagtggcacggttttgcttagcttgaattgcttttccttttctgttggtcaagttctcttttgttagtgatcatttacctcttttaaatctcctagcatagttcctggtcttccttttcttgtttttcccttgcctaatgcttactgtttctgtgttaattctggggaaagggaaatcaccttgagggtgcttggctaaaactacagagcaaggggatcgttgtttggaaagtcaagcgtgagcctcctgacctggggcattggcccaatcaagaagacctcgatgtttctttgtgttgggggtgtggggtgaagccaagtggccggtggctctatagtggccctgtaatggacatcagacctgcagtcagcaaggggtgggcagggtgggcatgggagggtggagaatcacttcagttggagatgagactgtggagaacctgggttttgctcagtgattcctgcatggggaggggttaggcgtctgggagacttatcagatttccaggacattttcagaccttagccctccctctgaatataatgtggtgaagaggcagacagaaggttaaaaaccagctggagctggatgacatgtgaatgtgtctgtgtgtgtgtctgttggaggggctgttctttgtcctgttatctttatgttttgcaaatgtttcaaaaccaggtgggtccttctcaggggttggccgagcgagggctggaggcagtgtcttcagttgcacctaggtgctgtaaaggtgacactcctggacctagacctgggcctgcatgtggagagaagtgaggccagtggggggccacaacggagccttggagtgtgcccatctgctgcccttgtgggcagaacgtggagcccatcaggaatggcttgtgggagacagccagtctctggggtgagcaccccatccagagaggtgcacagctgatggagtctcgctctgtcgccaaagctggagtgctggagtgcggtgatgagatctcggctcactgcaacctctgcctcctgggtttaagcagttcttctgcctcagcccccaagtagctgggattacaggcatgtgccgccactcctggctgagttttgtatttttagcagagatggggtttcgcatgttggccaggctggtcttgaacccctgacctcaagtgatcctctcaccttggcctcccaaagtgctgagattacaggcgtgagccaccacacccagcccatacacacttactgatttcattttttatagaaagcagccagctttcctgacctttggttgccaaacagaacaagcaaatccacatatatccatctctagggtttagtttagaataagaaaaactaggggtggggcctacttttgttttccaacctctccccagctgcttttttcaggtaagtagttgcctcttttggggtctcattgttactaagctgggtgttgatgtgctgagaaggaagacctgtgctcttagtcttggggatgttttctgccctccttgtgttaagataatcttgtaagtgtcaaaggccacagctctgcagccttttggcacaggtgaggtaagagaaatttcattttcctttccttctggtttaccctgctccttattcccagatgccctgaagcaccgattaaagggagtagtttttgcaccaggaacctttgcagcaggtgttgtcaacccgctggcctgggtcagggcagtgcagatcacagtcctgcttttctcctggccatgtgggttttcacctcatctccagatccagtctggggagatgcaagatgggaccagtgttttactaggttcacatatcaacatcagggaagcttcagggaggccgagggcctagagcatttcttccgggtgggaaattgagaattctgaattctgtactcattattaacttttcctggtctttaaacaaattatatagttgtttcttttcattgagggcaggaagaattttatttaaaaagtgctaagtgctaggtagtgggtggtagctcacacctgtaatcccagcactgtgggaggctgggacaggcagattacttgagtttgggagtttgagaccagcctgagcaacatggcgaaactccgtctctacaaaaaaacataaaaattagccagatgtggtggtgcacacctatgatcccagctgctcaggaggctgaagtgggaggattgcttgagcccaggaggttgaggctgcagtgagccaagatttcatcattgcactccagccttggtgacagagccagaccctgtctcaaaaaaaaaaaaaaaaaaaaaaaagtgctaagtgctgtgcccatagcctgtgcgtagcttcttcagcccaggtttacactagtttatttcctgacctgacatgacatctgatcagtggtcattaagtatctgtctcatgagatggagactgaccaccagtcagttaactgaagaacaaagacaaagattcttaaaaaacaatacatagtttagggatgtaaaaaaaatgataggcatgatggtgtgctcctatagtcccagctactcaggaggctgaggtgggaggatggcttaagcccaggagttcaagaccagcctgggcaacatagcaagaccctatctcttaaaaacaaaaaattgatatattctcatatgtcaatcttttattgtccttttcttttactttcagtttactaattagaactgctggttattttttttgcatatgccacaccaataatttattgccttcaatatctgtttttttttttttttttttgagatggagtctcactctgttgtccaggctggagtgcagtggcacaatctcggctcactgcaacctccgccttctgggttcaagtgatcctcctgcctcagcctcccaagtagctgggattagaagtgtgtgccaccacacccagccagtttcttttttttttttttttttttgagatggagtctcgctctgttgcctgggctggagtgcagtggcacattgtcgactcactgcagcctccacctcctggatttgagcagttctcttgcctcagcctcctgagtagctgagactacaggtgtgcgtcaccacagccggctaatttttgtattttcagtagagacggggttttaccatgttggccaggctggtctcgaactcgtgacttcaggtaatccacccgcctcagcttcccaaagtgctggaattacagttgtaagccactgtgcccggcctaatttttgtatttttagtagagatggggtttcaccatgttggccacgctggtcttgaactcgtgacctcaagtgatctgcctgcctaagtctcccaagtgctgggattacaggtgtgagccactgctcctagccttgttgttgtttttttttttttttttttttattgatcattctttggtgtttctcgcagagggggatttggcagggtcataggacaatagtggagggaaggtcagcagataaacaagtgaacaaaggtctctggttttcctaggcagaggaccctgcagccttccgcagtgtttgtgtccctgggtacttaagattagggagtggtgatgactcttaacgagcatgctgccttcaagcatctgtttaacaaagcacatcttgcaccgcccttaatccatttaaccctgagtgacacagcacatgtttcagagagcacagggttggggataaggtcacagatcaacagatcccaaggcagaagaatttttcttagtacagaacaaaatgaaaagtctcccatgtctacttctatccacacagacccggcaaccatccgatttctcaattttttccccacccttcccgcctttctattccacaaaaccgccattgtcatcatggcccatccccaatgagccgctgggcacacctcccagacggggtcgtggccgggcagaggggctcctcacttcccagtaggggcggccgggcagaagcgcccctcacctcccggatggggcggctggccgggcggggggctgacccccccaccaccctcccggacggggcggctggccaggcagaggggctcctcacttcccagtaggggcggccgggcagaggcgcccctcacctcctggatagggcggctggccgggcggggggctgtccccccacctccctcccggacggggcggctggccgggcagaggggtcctcacttcccagtaggggcggccgggcagaggcgcccctcacctcccggacggggcggccggccggaaggggggctgacccccccacctccctcccggacggggcggctggccgggcagaggggctcctcacttcccagtaggggcggccgggcagaggcgcccctcacctcccggacggggcggctggccaggcggggggctgatccccccacctccctcccggacggggcggctggccgggcggggggctgaccccccacctccctcccggactgggcggctggccgggcggggggctgacccacccacctccctcctggacggggcgactggccgggcagaggggctcctcacttcccagtaggggcggccgggcagaggagcccctcacctcccggacggggcggctggccgggcggggggctgacccccccacctccctcccggacggggcggctggccgggcagaggggtcctcacttcccagtaggggcagccgggcagaggcgcccctcacctcccggacggggcggccggccgggcggggggctgacccccccacctccctcccggacggggcggctggccgaccccccccgccgcctccctcccggacggggcggctggccgggcagaggggctcctcacttcccagtaggggcggccgggcagaggcgcccctcacctcccggacggggcggctggtcgggcggggggctgaccccccccacctccctcccggacggggtggctgccgggcggagacgctcctcacttcccagacggggtggttgccggacggaggggctcctcacttctcagacggggcggttgccaggcagagggtttcctcacttctcagacggagcggccgggcagagacgctcctcacctcccagacagggttgcggcccagcagaggcgctcctcacatcccagacagggcggtggggcagaggtgctccccacatctcagacgatgggcggccgggcagagacgttcctcacttcctagatgggatggcggcggggaagaggcgctcctcgcttcctagatgggatggcggccgggcagagacgctcctcactttccagactgggcagccaggcagaggggctcctcatatcccagacgatgggtggccaagcagagacgctcctcacttcccagacggggtggcggccgggcagaggctgcaatctcggctctttgggaggccaaggcaggcggctgggaggtggttgtagcgagccgagatcacgccactgcactccagcctgggcaccattgagcactgagtgaacgagactccatctgcaatcccggcacctcgggaggccgaggctggcggatcactcgcggttaggagctggagaccagcccggccaacacagcgaaaccccgtctccaccaaaaaaaaacgaaaaccagtcaggcgtggcggcgcgcgcctgcaatcgcaggcactcggcaggctgaggcaggagaatcaggcagggaggttgcagtgagccgagatggcagcagtaccgtccagctttggctcggcatcagagggagaccgtggagggagagggagagggggagggggagggggagagggagagggagagggttgtttgtttttttgagggagggtctctctctgtcgcccaggctggagtgtcgtggtgtgatcatgcagccttgacctcctaatgaccatgacaagctagtgtttttgatttttagtagagacaaggtcctgccatgttgttcaggctgttcttgaactcttgggctcaagcagtcctcatgccttggcctctcaaagtgctgggattataggcatgagctactgtgtgtggccattaattaatttaattaattttcttaatgacaattgagaacttagaagcaacatgaatgtggaattatagattttacaaattttcacccaatactctatacttgttttgccatacctataatttagttagcagattgtttctttctttcttttttttttaattaacaacttgttttaatagaaacttgttttaatagttttaatggaaacaatgatgcgcttatttcataggtttatatagttaagcatgtatgtgtatttatactatatgtgtattgtatgtatgtgcgtatgtgtaataaatgtgtgtatgtaaatttacaatgacaagtacagttggcataagcaggggtttgcagacaaacgtgtttcagcacactgggcaacatatcagtctgtagcatgtggtcaggatgcaagggggatccgttaatccattaataacttagggattttgtcctcaggaatctcccagcctagaggaggcaatgtctgtgtttaaataactataacccaagttagaaagcggcaggtgccttaagacagagcatatactcccaggaggaaggagccagagaattcatagagaaggaggtatctgacctgggccaattacttctttctttgttttttgactgtttttatatttagttaaatatctgtatatttcttttttcttttctttcctttttttttttttttttttttgagagggagtcttgctttgttgcctaggctggagtgcagtggcatgatctcggctcactgcaacctccacctcccatgttcaagtgattcccatgcctcagcctttggagtagctgggattacagacgcctgctaccacgcttggctaatttttgtatttttagtagagatggggtttcaccatgttgaccaggctggtctcaaactcccgatcttaggtgatccacctgcctctgcctcccaaagtgctgagattgcaggcatgagccaccgcacctggccaaatatctctatatttctgtaaatctataaataaaaacacaaacagatgaaccatcattgggccttgggcagtggtatggacatttgaattgtttttgaagtttctatgtctcagccagtacaggtgctggctgtttctcctaggcaatggagctttgtagtacccctgttgtctgtgctatactgcagggggattggtcaacaggatgcattcctttctgtcacagttcattatactggtcagagttctgaggtcaccagctaacctgagcataatcagttccttggaagacattgggtggagtgacctcatagactcataggaaacctgaaaagaagccaggggagaaacaattgttttgaaggagtagggagatttcccaaagcccagctggaatgctgttgccaggaggaggaaccagttaaggggcagggaccagcctttttggaaatgctttgtagaatgccctagggaagaggaaatacataaaccaagggccaggatgcaaacatacttttgaatatgtctcagatctgagtccacctgaacgtctgcaggccaaaaagcatagcacatcattcataggaactccagaaatgttgcccgactgcctcccacaacttaccgtcagtgcgggcatggaaaccttcctgctttctgctctgtgtgggtgggtgaatgtgagtgaggagaaacactgtcatctgggagtgaagagcccagctttgcagtcattcagcaggatgagggtggacttttggctctgccaccaacgcagtgtgggccctgtgctcttcttgtgttgcgtgtaaacgaagactgatattttctgttagatttctcagcgttataggttattggatttgttactgtgtgctcatgccaagagaaacagaagatgtataaacagctaggtggtaatcaactgttgactgcttgttgtagcagagccttccacaactttctcctgaccctcacaaatgcatgttttaaaaaaagagagggacctattgtaggcattattcagcaacttgttattttcacttctcttgagcttacacacccctgaatttaagctcttttgataacaaataattgaaaaaagtgcatggcaggttgtaggtgctcattgtgggatgaatgaatgaatgagccagtgagtgagtgttgtactctggatctctctccaggtcagtagtttttagtagttatgtcacactgaattgctctagtctttttcagacttgtactagcaatgtatgagtacccctgtattagttcgttctcacattgctataaagaaccacctgagactgggtgatttatgaagaaaagaggtttaattgactcagtttcacaggcttagcaggaagcatggctaggaggcctcaggaaactacaatcatggtggaaggggaagcaagcgtgtcttaccatggcagagcaggagagagacagagagcgtgaggggggaagtgccacatgcttcagatctccgagaacacacttactgtcatgagaatagcaagggggaaattcgcctccatgatctaatcacctcccatcaggtccctcccctgccacacagggattacaatttgccgtgagatttgggtgaggacacagagcctaaccatatcaaccccttttactgggcatttccaccagtgctagatgttgtattgtttttgctaatctcatggctgaaaatggtattatagtcttaattatttttaactaaaaactgtttttcaccattctgtttctatggagcacttttattttaatttgtgttttcctgagtactggtgaggttgagcaccatttcaccttttttctttattttttcttctgtgaattccatacctatatcctttctccgtttttccgtctactggattgttttgaatttttaggaactctttgtatattagggctataaattatttgttgtgtgcattgcaaatgtgtccccagctattgtttctatagtttgtttttacattgtttaggtgtgttttgccataaaattttaagattttttgcaaatttctatttctatttctttgtaaaaatgtttgtttcttcttccatccatggtctaaatgaaattacagatcagtctcatatgaatgtaatatgtgtctattaatgcatatatatgtttatatatttgcaacattttaaagtaggtttctaaatcaaataataatttgaatacagtagtgtattaaaagattaatttttcatgaccaaacaaggtttactctagcaatgcaaggatagcataacatgaggtattgtgtcggctggagaaacttctagctcagggattagagcatggtttgccccagtcctgccatttactaattctctgacgttagccaaattagttaatctccctgagcttcagtctcctcatctataaaattggcaggacaattacaatactgctgtatagggttgatggaaggacgaaatggggtatctgtgaaatgattagacctgggtttggtgcataataagtgctcagttaatgttatacatcacaattcactgtatcacattaaaaagaaaacccatgtggttatgttagcatatttaaaaggcatgtaatacaattctgccgctaatcttaatgaaaatctaaaacagtcatagaatctacataaatacagaaataggtgccaacacccagcagcaagcctgttaagtggccattctgtgacactccaggcatgacagggaggcctgcatttagcactgttgcctcaaatcgatgatcctgtggacttgtcaggcttttggggagaggagccagtctgtcgcctgggctggccagtgttgcctctgctctgtctggagcaagtgtgcattaaggcctgcgcttgccagtggcctttcaccagggtgtagcttctggccttgctctataggaaccaggaattcctggggttgggctgggaagaggatcgttaaagtgataagcctggaggcattttgagaactacctgtgacatttagagtgaggagggtcagcagtgggtgggttagcctggcaggtgccaaggttctgtactccctctaggtgaagaattagcacaggcatagtttctagcccccttttcctctcctacatgcaaaataagatgatgaatgttctccaaatgacagaggaggggaaggcctcaatgctgtgaactctgtagggtttcagctcagattggaccttccagactggcctggaaagccatgggggccagggtgtctcagcattggcccgcttttggcctggtatttgttgaacatctatcagtgggtctttttcttgtgtctgtcttacagcatttctctcatctacccctagtttagaaatgttttcttagataacttaaaattcatgtaaaataagaggtgatggatatataagttttggaacatactaataaatgcctgggagccaacctcctagctggagaactaaaccactgtgcaccacagggaaactcctagtgggtgctccctgccagggggtaaaggcattctagaatagttcatcattcctgcaccttttttttttttttaaagaatattgacaaggctctggttagaaaaagggaaaaaaaaaagaatacttatacacatgtatctgtaaataatatattctatttttgtttatgaattttataaaaagagactcataagtaatctgcaaatttcatttttcattcatttttacagctggataatttttcattgtgtgcatgctatatatatatatatttgtatatattttttatttttgtagagacagggtcttgcccgaactcctgagctcgagcaattctcctgcctcagcctcccaaagtgctgggattataggcatgagccaccatgcccagccccctttctaccttttaatagatatattttagttttatttgtcttatgagtaaaccacaagaatggggactttctctaatggatttctgtatcctgtgaaagtactaaaacttgtggtgaatatggtgggagcgtcctccatgctaataactgagtattggcattggatttaagggagtcagtaggttaaactgatacagattggaccttagagagggtgatgtgagtgtcagaacaagaccaaaatgccacccttgttacaatgtagtagaagtggtggactagagctcatctgcagtgcaggcaggtgggcttgctgactctccctgacccacattctaggccctggcacagtctactcaaaggtcagctgggtctgcagaggagatatccttgctccagctggctgccttgcatcaatctggggtggagaggaaaggaaaagaggactaattcccaaagcttatgttgttgttgttgttccttctcctcgtcctcctcctcctcttcttcttcttctttctcttttcttcctctcctcctcctcctcctccttcttctcttttcttttctttttttttttttttttgagacaagatctcactgtgttgcccaggctggagtgcagtggcacaatctcaactcactgcaacctccacctcccaggtttaagcagttacggtgcctcagccacccgagtagctgggattacaggcacacaccaccatgcccagctaatttttgtatttttaatagaggcagggtttcaccatgttggccatggctggtgcttatgatcttttaatggatggcctctacccagacaagaagcctgtatgtggtacttctgcccctactcaccaggaagagcactctcctctactgttctccagtggggaggagttaggcgtggcttagaccaggagcattgagggaatggaaatcattggcaaaggggagctggcatccttccctactgtttagaagtagatcatatctaattaacaggtgaatgctctgggtatggcacctgctatttggtgctcatgggaaagggccttgggtagacggttcaggcgccaggcccttggtggaactggcttttgtttttcattgtacctagtcatggtacactggatggcggataaccggaagcagagtcgacatagggatacggagggaaggagacttacatagatttcaggacaacagtgagctgccaggcaccaggccaggtgctttatctcatgtaatccacttggtaacatgtgaggtgggagatgctggtcctttttatacaggtgaggaaacagaggctctgaggtaaattgaattgcgattccacagctcgtgggctgtgagctggcatttgtatcaggctacaagttaaggctacgcttctgttcttggtacttggcatccacacctgagctatgtgtccccaaggatgaggctgccatttctctcgtgggcttttctcttttcctcttttagcatatgctgtgcccctagaccctaagccctgtgctaggtgccaaggaaacaagggcaatgagggatgatggagacgggagtggaggatgggcccaggcctaagactggagtgtagcaggcctgtttctgtgtcagttacaggggagagcagccaacccagtctgggtttatggggcagggggccatgcgtggcacaagtgtggggcttgccacacctgggcggagacaggcaggcatgttggctggagagcttgcttgcgagctttgcagctatcaaatgtgtaaattccaaagtgtatatgtagagtttctgattgaatgaaacatttgaaaaatgaatggggaaagcatctggagtctttttctcaatgagaagttaaaggaggaagcttcagtggagccttgttgacaaaaaacagtgtggtacagattcccagttgcataattcagagcactggggaagttttgacctgtgttttgctcgtcaattcctgagcaagtggaaataatgaagttgctcaggagggattgccttgtgggcgagacctgtgacagagtctgtcattttgaaccttctgttctggaaatactttttacagtgtcttctgccttttttctttttaaagattgttttaaaaacaccacttctcgctttctctccttatctttcagtaatttgttgcagggcattttggataggaatatttcactgatattcttgtttgagctgacggtcatgtcccagatgtgtttgctgcagtatgtgggcagatatatgactgccctgtcaaagttcttacttccgtattgaccccagccataaaagtcatgataaatctggttcacaatgaacaatcctcacatgctgttcgtaattagaaaatccaggtgtgtgcttttatttctagaattttgtcctgtctgaaatgtaggaagatgctgttataaagaagcacattcaaagccatttaaaagcacggttgagctgggtgcagtggcatgcatctgtaatccaggtacacaggaggctgaggcgggaacatggcttcagcccaggagttgaagtccagcctgggcaacataagaaaaaaaaaagtaaaagcatggctgacttttcttagagtgaggcagtagactgtgtgcttcctggcgtggtgtccaggtcggaaagcccagaggtggaattctcctttggccactttgggcccatcctggtgcagagctacaacttcaggtttcctagtgcacagttctgatcatatctttttttcctagatgtataaggaactatttttctaaaatggtggtggtttaaaatatatatatatatatttagtatttattgatgattcttgggtgtttctcggagagggggatttggcagggtcataggacaatagtggagggaaggtcagcagataaacatgtgaacaagggtctctggttttcctaggcagaggaccctgcggccttccgcaatgtttatgtccctgggtactggagcttagggagtggtgatgactcttaaagagcatgctgccttcaagcatctgtttaacaaagcacatcgtgcaccgcccttaatccatttaaccctgagtggacacagcacatgtttcagagagcacgggattgggggcaaggccatagatcaacagcgtcccaaggcagaagaatctttcctagcacagaacaaaatggagtctcctatgtctacttctttccacacagacacagtaacaatccgacttctctttcttttccccacatttcccccccccattggacaaaaccgccattgtcatcatggcccgttctcaatgagctgctgggtacacctcccagacggggtggcggccgggcagaggggctcctcacctcccagacggggcggccgggcagaggcaccccccaccttccagacggggcggcggccgggtggaggctgccccccacctcccgaacggggctgctggctgggcgggggctgccccccacctccctcccggacggggctgctggccgggcgggggctgccccccacctccctcccggatggggcggctggccgggcgggggctaccccccacctcccggacggggcggctgccggacagagatgctcctcacttcccagacagggcggctgcccggcggaggggctcctcacttctcagacgatgggcggccgggcagagacgctcctcacttcccagacatggtggcggttgggcagagacactcctcacttcccagactgggtggccgggcagaggggctcctcacatcccagacgatgggctgccaggcagagacgctcctcacttcccagatggggtggcggccgggcagaggctgcactcttggcactttgggaggccaaggcaggcggctgggaggtgggggttgtagcgagccgagatcacgccactgcactccagcctgggcaacatagagcactgagtgagcgagactccgtctgcagtcctggcacctcgggaggctgaggcgggcagatcacttgcggtcgggagctggagaccagcccggccaacacggcgaaaccccgtctccaccaaaaaatacaaaaaccagtcaggcgtggcggcgcgcgcctgcaatcccaggcgcttggcaggctgaggcaggagaatcaggcagggaggctgcagtgagccgagatggcggcagtacagtccagctttggctcggcatcagagggagaccgtggagggagagggagagggagaatatttttatcatggtggtttgtaatgccacctcctttcattgtttttagcttagcgttagcctgcagaccctcagaaactgctgagtggtgagaggtggtgcaggggtaggctgtagcagagagggctgtggagaggctgggggcagggcagggtggtgcagggagcctgggtcgctgtctgaccgcacagctgtgggtggcgtggggaggcgctgcaggccagcctcccatctcatggtcagcactgcttgttaccacaagcactccatatctggtggtgcactgccatggagcacctcgggtgacatcagcttacacggggccctgccttcctttccaggtgcttgcttacttaaagattttaacaaatcatttgatttctttaggcttcatcttccttggctaaattttaaaaagaagaccacattgtccctgactcctttttgcaaaggacgtaatgaatgttcgttaaacttttgtattattatttctataataaactttttattttacaagaattctatatgtgcagaaaagttgcaaaactaatagagttcctgtctaccttttgcctgactttctctaatgttaacattttatgtaaccatagcttattttttgaaattaagaaattaacattgatgcagtattactgaataaactatggactttctttggatttcaccagttttcccactgatgttttcttgcagttctaggatcccatccaggtccttgatgatttttcctagtattagattggtggatgaatttggggagagtcccacagaggtgaagtgcccttttcattacatcatctcaggaggcacctgatactgccatgactcaccaccgtgatgttaaccttgcgggtttactttagtcgttctcctttttaaatgtgattcaggtggcactggttccccaaaagattgctgatcccttcaggccaggaccctgctctgcttgctttgtgcctcttcccagcgtgaggacttgggctgtggtgccagtgtcgaagggggcatgccaggtcaggtggagatgcatttgggttctgtgattttgtgagcattctacagttttcacatcacaggtgaaacaggattggccatgtgttgatacttgttgaaacggggggtcattctagtttcttttcttttttttttctttttctttttttttttaagggccagcatctcaccctgtcactcaggctagagtgcagtggtgggatcatgattcattgcagcctcaccctcctgagtagctgggaccacagctgtgcactatcaagcccagcttaaaaatttttcgtagagatgggttctttccatgttgcccaggctggtctcgaacacgtggactcgagcgatcatcatgcctcggcctctcagagtgctggaattacaggcatgaaccactgtgcctgacctagtttctactttctacgtagaaactacgtaggagaagggaaaactatttccaatctacagcgataatcaatcccatattgcttggataatgccggtgttacaatggtcatcgttgccagagttattgaggtgggaggattactcatcttaaatgtatttggttcttccccaaggcctccataagaagaaaaacttgcatctaaaccagtgttaagtggtactgctaataacagggtaataataatattccttaacatctttcagggagaaaaatcactggtgtgccatcagaaaagaattccaattgaaatgaggttacagattagttggaatacatttatagaatacaaagaaagtttaccatgtaatgtcatgatcatttgttgaaaagaaatttgtaaaatgagatacacttttaagtttatagttggtattctatttataattatctccatatttcaaactgagaatggaagcttttagaagttagtgaccatgtcttttaagttgtatttatgtaacacttgcctagaggctttagatgtatacttactacgtggctgtattagtcagagccaatagggtggatggatggatggatggatggatggagatagatagataagaagcagtttattaggggaattggctcacatggttgtagagtctgagaaattctatgacaggctgcctgcaagctggagactctgggatgccggtagtggggctcagtccacatttgagggccccagaactagagaagccagtcatgtagctctcagtccagtgctgaaggcctaagaacccaggggccgctggtataagtccaggagtccaaaggctggcaagcttggggttccgtggcccaaggcaggaggtgagtgcatcccagctccaggacattgatagacacatttgcccttttcctgtttttgttctttttaggcccccggcagattggatggtgcctgcccttattgatggtggctcttccccacctcatccactcacactaatgtgctagtctcttctggaaacagccccatggacacaccccaaaatcaggctttactaggtttctaggttttcctaggtgttccagtcaagttgacacctaaaactctaaaactaaccatgacacatgccaagtattgaaaatctcgaataagggttcaaatgctacctatttcttttcccatcttgcccattttctttttccccagcactgatccaaaatatagaaggagaagggagaagataatggtagcgtcctggaatgcttggcaccacgatttcattttcttacatatttatacccttcctggtttcactaagggtttgagttggttattagggactatgaaaaaaaaggtggcagacttgaactcttcctttgccttccccaaaacaacaacagtgaaacagatgtttagttctgggaggagccgttgcaatcacccacagctgtcttgcagtgtcacgctgtttgtggaggtccaggacacactcggccgtcagagggagccagggttgcagcttcccgcgctaccattgctgtgcaactgtgggcaagccacttccccaaacctgtagttttctcatctgaaaactggcgcagtactcccaccttgcaaggttatcatgagtgtatatcctgagtatatcattgtatataaagatctgaggagcgtgtataaaatgtcataaaatatgcactcagtaaagtacctaatttgatcatccatttgcaggatttctttttatttttgagatggagtctcgctctgcggcccaggctggagtgcagtggcgtgatctcggctcactgcaaactctgcctcccgggttcatgccattctcctgcctcagcctcccaagtagctgggactacaggcgcccacccccacgcccggctaattttttgtatttttagtagagatggggtttcaccatgttagccaggatggtcttgatctcctgacctcgtgatccgcccgcctcggcctcccaaagtgctgggattacaggcgtgagccaccgcgcccggcccatttgcagggtttctaaacaccaactcacaatgccagtttcactatcatgctagacgatgaaacaccaacagtataattattctgttacaaagttaaagatctttagtttaaggcttttcattgattctggggttgtattacctgtcttttggtgttaaaatgtctgaaatgaaataatgggagtgataggtctttttcttttttaaatgtccttagggggcaaaataaagttggcggccttgtgttggctgcctttcctgccctcaggaaaaagccctgatcagtaacattgggatcttctatctggtccctgctctcctttgagggaggaggaagccccagccaaagaggggaggccacagccagaggtgcagcaggacacggcccttgtttacgtgattcagctcagagtccagccttcctgggcatcttctcacatctcttcctggccccctgtcccagccccaccttccacattccctgcctagtttctgttacggagcacctgtcaccctgcatggtcctctgggtactcgtccgtctaccctaccagacttgaagctgcttacggacaagttcgtttaagttaattatttagtttgtaacttccagagcctggacagtgctgaaaaatatttgtcagatggctgaattaaactataaataaatgaggggaaaaaaatcacaccgataaaacattaacataacatgcccctgactttattcctgaaaatacccacagactcaccaggaaccttgctcacattccttttgaatttcagatctttcttggatcatcttccatttttaatgtgttgcccagagaaggctcaagctgttgccaggaccatgaggctgcgtgacatcttaactgagatgtgctagaaatctagatgttgcttcttctgtggcatttggggattctataaaatgcataagaaaaaaattaacatgttccctctatcacattggtgctttcaagtttttcctcaattgggctgtctccattaattagtctcacttcactgttaaaaaaatctttggacaagtgccagagaagcaaagaagcttatgtaaagggttttaacattttctcctttgccaaagatagaactgatacttagctttgctttgtcctgggaccttcttctttgatagagaatgttagacatttggcttggtttattcctttttatgtacacgtgttggatgagtaaagacaagtggcttttttttttttttagatgcagtctcactctgtcgccaggccggagtgcaggggcacgatctcattgcaacctccgcctcccaggttcaagcaattctcctgcctcagcctcccaagtagctgggactacaggtgcacaccaccacaccctgctaatttttgtatttttcaaagagacggggtttcaccattttggccaagatggtctcgatctcttgacctcgtgatccgcctgcctcagcctcccaaagtgctgggattacaggcgtgagccaccgcgcccagcccaagatggctctatttacatcttggttcatgaaacatatgaaaggctaacaagtaggatttgcaaatagccactaccctgttctcagccaaaagaaaaatatgaaaaagattgacctatcacattttcacataatttatttatgattatttatttatttatgattatttatttatttatgattatagtaggtttctagaatttaagatttacttatttgaagagagaaactaatgccttaaattatcatattaaattttactggtttactgtctagcagccattgaaacctattgctgacacctgccacttccaggtcactgaactgtcattgtcatgcctttcatcgcggtgctagtgggaagaacccaagctagcctggttagaaagtggaccatttggatcctctaccaaagtcattggtagaggatcagttattccaagaattgaggcccaagaaatacacttgggctaaaatgacacagaacttactttaatcttttgaatctgaggcactttgtggttcttggttaatgtcagtcaccactgtattgcagatgcagacgctgggtaggaaggaagctctgttactagacttctgctgggggcttttcttccttttctcctgttttctcaccttcttttcccctccttctcccgccttcttcctctttattgaggtattagtttacatacaattgaatgcatccttttaggagctttgacaagtggaaacacctgtatgactcagtcaagacagaatatttccattgctccaaaatttccttgtgtccctttgaagtcagtcccccaccctgccccctggccctggcaaacattaatctgtcactgtagattggttttgcttggtttcgaatttcatccacatagacacacacagtgggtgctattttgcatctggctgctttgctcagcatgatgtttttgtgattgatccatgtcacatctgtcagtagctcattcctttttattgccgagtggttttcagctgtgcgccgatgccacacacagttgggttttgatgtcctctatagagatgtgtgacaaacctaggtgctacaggagtgtgtgcatgccctccccatctttcagcagcatatgaggaaggcagagggaactagcaaataaatgaaccagatttgggggaatcttctttttatccaagccatgggtcttgctagtccttgactagtttggcttctcagaacaacactattctagttacccctggcttgggccagcctgtaggatctcggtgtttgcctttctggagatggggagttacaaattcctaatggaaaaggcttgtggtcagagcagctccttttggtcttttgtctaactttgtcgtccctgctgccgatggatcacctggctctgtgtttggggcatgcaaagttcagggacccaggtacataggaactgtagagcctgccctgtgccaggctgccaggtaccccacctcctatgccagccacctgccactcaggtctcctgccttgcccttgccctgtcctggctcagctgttagttttagcctgctagggaaagactgaggcgagcgcagaactgcaatctgtggtattctattaacaacccaattattgtgtgcccatgatcactttaagaatcaccttttttttttttttttccagacggagtctcgctctgtcgcccaggctggagtgtaatggcacgatcttggctcactgcaacctccacctcctgggttcaagcaattctcctgcctcagcctctcgagtagctgagattacaggcatgtgccaccatgcccagctaatttttgtacttttagtggagacagggtttcactatgttggccaggctggtctccaactcctgacctcaagtgatctgcgcaccttggccccacaaagtactgggattacaggcatgggccaccgtgcccagccaagaatcaccttgtaaaacacaatgactgccgcgggctggggaaagggttgggaatagagggatgatagctaaagggtacagggtttctctttgaggtaatgaaaatgtcctacccttgacggtggtgatggttgcacacacctgtgaatatactaaataacattgaattgtgccctttaaatgggtgaactgtgtgacgtgaattatatctcaataaagctgttttttttttaaggcagtatagtattagagcgatgacagaccagtagagaagtggtgaaaaaaaaattgtagaaattttattgtttccaaatgacacgaccttttgccaaatatcttgattttcatagcaggtcccgttccatgggaggcacgggtgtggtagagagaggagggactttgtatcaagtggacctgactgaatcccattctgcccttattagctgggtgaccttgggcagattgcttatgttctgtggtggtttccttccctgtaaaacagggctaggagtacctatcttatagtgtttcaaatgagcgtggtaaacgtggtacaagcagtcatttttaccatgcgacaatcatataacaaaaggcctcagatagaagcagcagccttgctggatcctgtcctgtctttgagtcctgctaggctgatgaactggcctgctggagctgcactgaccgctgggcgaaagaatccccctgggaagtgctgccctgcgtgttgtttgccgcctctgcagggggcctgagctgatgggtggcgctgctggtctttagttaacttggtggactctctgtttctgaattttcttccgccttaatccacatggtttgagtaggctggttgcacactcttggagaaccagcacgagatgtccctcattttatttatttgcacttctgctcagcctgtacattgtgggccggggcagggaccttggctgctttgactgtgggaccctaagcactgtgcctggcattaatgtttgttgaatgaatgtccaatggtttccagtctttgatgacagaagccagatcagaactggaattccagcttaggctctgcatgccagaggccagcaggtgagcttccctgagcggtttctgtcccagcatcacctaaagagtggtcgggcagctgtatcactgccagggacaggagagctgcctgagtcagtcttgtcttctgccatagtccacgtttcctgcctggaatccactagtgagatgtggctgacatgggcagggagagggtgtctttagccacactggagatctggtctgatgacttcctagtcccactactattcagttcaaagtcagttttctttttctgcgccgccccccccccccgcccacaccttgctcttgtgactgggtacttggggcaggactcacaatgcctccacccaccccaggcatccaggctgcactttgcctgagggcatgtgagggtggccctgtgacttggactgtgaatggctgctgggctggccttcccttgccctgtgctggatgtggccctcaccccctaccccagacctcaccctccaccccccacccccagttctgccttgggcctcttctccttttccaagttcagctttttattaagcagaaactatccaagacccagttctgaccgttgagggaagtcaagttggaggggcagtgttgtgtagcctggcttacaggctggctctccttgcgccagctgtgggacacttagcaagttgcataacctctcatctgggaaatgaagataacaatgcttacccccaaagagctattttcatgattagccagaaataaagtaagtgctgtgtaaatgtttattgagcagcctgtgtttgttggatttaaaagaagagagtgagtcttttaaacaaaaagccctcccataaccagcagccctaagtggggctctgggacaaaaaaaaaaaaagttttctggtatcctggcttgggggagggaacaggtagacaatttttgtattttttagtacagacggggtttcaccatgttggccaggctggtctcaaacttgcttccccagaactcaggcgctgcttctgtcttagtggagtgagtgcttgccagctgtggcgggcgtggcactctggtgttcatcttctgtgatggtgccgtggatttaactaagccaaccacaggatatagtgaaatatgtgttgacttctctgcttttttggtgacgggctgtgtggggaggggtggtaaataatttctcaagtagtgtaaattattatcatatgtcaagtaatagagtctcatgttatgtggtctttgcttttattggtatttttccattaaggaatttctttttctcttttttttgagacaggatctcgctctgtcacccaggctagagtgcagtgacgtgatctcagctcactgcaacctctgctccctggggtcaagcgattctcgtgcctcagcctcctgagtagctgggattacaggcatgtgccactacacctggccaatttttgtattttttagtagagatgaggtttcaccatattggctaggctggtctcaaactcctggcttcaagcaatccatttgcctcagcctaccaaagtgctgggactacaagtgtgagccaccggcccagcctaaggaatttctaaacacaagatttttttttttttttttttttaattgatcattcttgggtgtttctcacagagggggatttggcagggtcataggacaatagtggagggaaggtcaacagataaacaagtgaacaaaggtctctggttttcctaggcagaggaccctgcggccttccgcagtgtttgtctaaacacaagattttcaaaagagatttttaacctacttcgttttgtgttataaggtaagactagatggctgtttttaactgaacatttttgaatgaatatgagtagcaagaacactggtaaatagtgtatatccacttagcacagtttccccttgcagtatgttcttttgccaattacgtattttcccatccctacatacacccgcttgggccatgttgaaaggaggaaccgccctgaactggccctgccctggccattaccacttagatcctggcttgccaaggggaatgggggagtgtgcatgtgtatcttctaggagggcacctagcagaaattgatcccttgaaatatttgtttcctgtctgtttttgcaggttggtttccatatctactctttcctgtagtgtctgtattttttgttactgtatgagattttaaaaagtgttattgaataatatgcatacctaaagtgcacagatctcaagtgtacatatcagtgaattttcacaagcccagcacacccatagccagtttaagagccacagcacagctccaaaaccctcctggcaccccttcctgcctgcctcctctttctcttccctgtcccggcttcgaagggtgtagattagttacgccttttcttgtgctggatccaaagggaatcgtacagcatgtattcttgtaggcacaagcattttaaaatctttctctcctcacctaaagctttattgtttttttcttcactttaaattctttgtaaaaattgaagaagcgaggtgtttttatttccatgtaatcacagttgcgtatttgagtgtcctagttcttaggagacagtcgtgctgctgagagaccatggggtcacctgcctgtctccaggggactctgtgtccccagtcctgtctcctgcatgaggcttcctgttcatctgctgacaggcattgccttgttgtgtgtagtcacagaaggaagttgacttccacatgtagggacagtgtaagattatcctgtgcaagcaagtccctgtcccactgactgctgtgacgcccctcagatgcagagagagcatgctgtcttttttctcttgtaagcaggaggatcccaaatacaagaagatattagaagactcatgtatggtgtaagttagtttgtatataatttgattttttgtgtgttggggagggggtagtatgaattttgttctcagacctcttctccctgattttccgtggaaatactgaaatttctctttggccactttctgaaaagagagctcttctgtgatggccacagcaggcaggagcgtgcagtctgggaacctgggactgtacagcgaatgcagcagtgtatgggaatgaccttatctcggcagccaacaggaaatgatgaaatgtgctgggagaattcagctgagagacagaggtcagacatgccagcagggttggaaagaggcaggtacggaagctgagctgcagagttagccggcatctgacagaaaaatgtgagtgtgctgtggaaggcttgcatttcctttaaggtagacctctttgaaagtagaattttcacggaattgttttctttctcactgagtgactgatttaacagaactctcaccttctatgcaagcgcacctagttttagagctccgtgacggcaatgttcaattagttcattattaactgagcaatgcagaatgctttatccagggtgcttggagaagatgtcagagtaagtgtttgattttcttggagaatagatttcggcttaaacaaatgaaggattgtgttttgtaatttttgactctggttttagaacatacgtgcgtgtttcctttcaaaatagatgcaataactttgcacctttgctttggcatgttttagagtagctgacatactttagctgtatttttttcttaccgagtagctaaatgagttacttgagttagctgttaatagagggcttttccccctactttaaggcgttaatgtttattacatgctgccattttctttctttacagccaaatctaatctacaaacacataagtgggacttgagagagaaagcaaattatcttttccaggagactgtaattgctgtttcatgactgtttactgcagagtctctgatcacctgccaccgctccaggacccctcccgaccaccttcccatcctccccctcagttcttctcatttctcatcccagctggaccctgtgccctcgtccccctctgagggctgtcactagacactgtttatatttttgtcgggtaacaaaatgtaaaagtcttattgttttaataactgagcagccttatgtacgtattcaattgtttcttagaagtcatattctggaatttttgaaaaacagtggctcccctttattgctgtggtgctgtaattctaattagatttttaaaatcctgatacttaagtgacccatcactcagtgaattatacttactggattactgattgccattaaaaaggcagcatcctctctccgtcctccagaaaatactgtgctggtgcagcctgtgcctcacagaaaaacatgctttcttgttaggatgttacctactgtgaagtgtgtgtttcaaatacttttaagattgcataggaaaggtttctagaaacccccaaggtatatagtatgtctgtccgaccttaatcgggcccatcagttttgtctttgctcttgtagctctgaatatctctttcttcagatcccttccttcttgtcagtaaaacatcctactgaattctgcatgaattttaaatgctgtatttatgaaaacagcaaagaggtttcataacttcaaaccaaagcatttttacaggtatgagatttatgccaataagtaaaaatacgccttccttttttctttttaaacagtgttagtcctttgagacccgtttgcccacccacacaattctgttattcatttggtggcataatgcagaaggtgggaacgcaatatttagagctgtaatggctcttggacttaatattccaggatcctcactttaccaaaggaattgggatccagaggtgacgacttgtccaaggtcactcgtctcgttggtagccgagtgagtctgaaaccctggtcatgagactcattactctttccattacagtaatctgctttcttcgcattattatcttaagatgaatatcacttagctaagagtgttttttttttctactgatgagtccgttcatatttgtttcactttcaaacactcagcttttattcaataacttttttgctgtaagtaccatttgcatagatgtatagtgaattacctcaagtacaaagagcattgacatttcttaaaaatcaacaattctctatattataaagttttgcttgcctctcccctagctcaggggagagacagtcaattgttactgatagaagcgggcctcacgatgggattgcttgccagatgagaatgccaaacttaatacaatcacaactaatacaagaaacagacaagcactcaattcttctttgaaacaggattcttcagggtgtgaaagggaaaccccaaacctttagcatttctgcctttcagcccctataagggaatactgactctgtcttgagctgaactgaagaggtattggaatatgaaagactttaaaataatacaacataatataaataaaggagaaaacgatttaatttataaaaatggaatttactcacaattttccagaatcattaaaaatggtctctgctaaaaattcagtttgaatcctctgaaattcaggtgtgggagttagttataaacaggtatgctgagaacagtgggtgactgttcctagacctcggtgtggccatcactgtctgtccaaagtcaccttaaaataccttggggaggttcacaggatagcgcttatttgtattttctaaagtatttagaatatatgccttgaagaatttctgaaacaaaagcacttcaggaaaactggcactttcataaatatgttaattgtatttgaagttgaatttaataactttacaactattttaatttatgaaactgaagaatgaagtggaatacataagcaatatttttatgcagtgtgtcagaactgtcttccctcctggtgttctagtgggcactttctgtcagtctccttaaagaggtgctgctttcatttggtgagccaggcgacattatcctagagaagaagtggggctgcaggctcaggagccgcagtggcttagttcgcttctcccataatttagttacctttgttccccaattagcattttatacttactattatattttcactatatattaagtatagaatattccaatcggcttccttttcttagtgtataattgaccttcttatcttctgcagtctataagtaacatttgatatgcttccctccctggcctctagcttctgcccacattagtataaatgttgctgtgcttgtgagatttaaagatgagaaagagataccagactgttgcagtgctggcattgctccaaactgagaaggggttaaacggcagccccctggggctgctgttggcttagaaatctcagagtttgtgttgttggtgtttgggcctttttcatgtccacctctgtccagggcagctctccagaccagattctagaagtggcctcagaaccttctctaagactatgaagaaacatcccccagtatcctaggcccttagagtttggtaaagaggagcatgtatgtgtgtgtcagtatggtgagatagtaattagacaagggttattgatttgaatgaatgaatgaatgaatgacattgtttgcttttccatagtgattacttttgaaggcactatagtcacatttcactaggtggtctaaatgcatttgcatgtcacagttctgccttgacaccaagtaacaggttgtgtctacctgacgtctcctccagccctggggctctggcctaagttttttcttattagactctgtcatatatgaatcataagacataaatctttatgtgggctcatggtacatattttattttgagaaacttaaagaatctaataggaagttagaattaatttgaaatgtgtgccagtggtcatcacaatagtatggcatttagattatctttttgttaatgtgaagggtgctatgaatttcatactcagtcatgtttcccatcaggatttgttctacagtggagtccttgaaggagaacaaggaagaatgattttgctggaaaatgcttacttgacgaaatgttgatgtaattaacaggacaaaatgttgaacttcccaatttggaactctctctttgactcttaaattcctaacatagattggtagtgctagtttaacaaaataaatgaagcacatgacagttttggggataatgaaatgacttctctatcttctctgctatgaactgacacatgaagaaaaaatagcacagggcgtagtagactgatcaccagtatctattgatttggaagacagaaacatttgttactactttcccatctatagggacggtcacctcaggttcacttagtcagatcctaccattactgtgcaggaagaatgttagaaagcaagactgtaaagccatgaaggaaagtggcaagaccacttttggtggataaatctttcatacttcacattgaactcgaagacattaaattgaatcttaggtgtacccagtgaacttctgaggttgaagagtttgcatttgggatggtggaagttgtcatgatgatgaaaagtcatgatgtgaggctatgtaaactgtacttgtcccagcacctgacagcctttttttttttccccctgatgctatctccaggtatgacagcttttattggtagacatgcaggcacctgagtgagctctgggcttatttccagccatccgttagatcactgcctggagggacagttcacctggatgctggctggctggatcagttgatttgttttttcgttcgttcgttcgtttgtttgttcattcattcattcattcattcagtttaccttcttggtctcttgtccacgcagttcacatcaggcactgtgctagactctagggatccatagacggttaggattgagttctggtctctgaggacctcacagtccagtaaggtaaagagacttctaagcagcagggtggtgagtcttaaagagctattgggaccttattctgccatgaagaatggaggagattggggggaaactccagtttgatgatgagttttagagggagtggtttgtcaggtacccaagagaagcagcgggagcaatatatgcaaaggcaaggaggtcagaatctgccagacttaggagcttgttgtggctggagtgccgtttatatgtggacatgcttcaggaacatcatatttatcagatccaaaccagtttgttcttaattctatttttctctttgtggcattatcacctaccatgcctccgaaatttgagactttgaatccctgcccccatcccccattccctggcatcatccatcactatgtcctgtctgtttttcctcttggatatattcctctttcctggtcttctaaccatttccctttctccagacttgaacctccagaactgcgatgtccagtgtggtagccactaaccacgtgactgtttacattaaaattgactaaaattaaaaagtcattgagaccagtctggacaacatagtgagtcctctgtctctataaaaaataaaaaattagccaggtgcagtggcacatacttgtagtccaagcttcagaaggctcaagtgggaggatcgcttacacccaggaggttgaggctgcaatgagctgtgatagtgccactgcactcagcctgaatgacagagggacaccctgtctcaaaaaaaaaagtcagtttctcacttggactaactactttttaagtgttaatagctggtggctgccatactggacagcccaagactagaggctcaatgggctgttctccactctctgtccaagggaaccttcctttatgtgctttttgctttcaagatagggtcttgcccagtcgcctaggctggagtgcagtggcatgatctcggctcactgcaacctccgcctcccaggttcaagtgattctcttgcctcagcctcccaagtagctgggactataggcacatgtcaccatgcctggctaattttttgagttttttggtagagacagggtttcactatgttggctaggctggtttcgaactcctgacctcaagtgatctgcctgcctcagcctcccaaagtgctaggattacaggcatgagccaccgcacccagcctcatgccttttaacctttgtacttgctgttcttattctctccagaataccattcttgctctaagcattcctctcttccctggctttccttaggtgaatttcgtctcttttttcctccagtgtccttgtaatcacacaatcacgcttgcctctgagagggcacatatatgtttatcgtgtgtcgagacatcatagtatagtggttaagccttggggacagattgtcttaatttcaaaactagccggttacttgccaggtggctttgaacacattacttaacctctcggagttttagtttcttcagctataaaatgaagacaatggttttttcctcgtgttaaatgaaacccttagcactgcatttaaatatatagctctcaaattgtagctgagagctctcattctagataaattcccttcctctgttcatcagccatgctaaaaccatttaatggtttgttaatgctaataatgctgttacgtttcttcttttctgattgttacaccttttagttatttttcttattgcagtggctaggcccttcaatgcaatttgcatagacatgtaattttttattcctgtaatttctattggctgtagttcttctggtgagatttttattctctcttttgttttgattgcatttcatcatgcccattttccattgcatttttttttcactcttagtttagaaattaaattctcagcctgctcctttagtggttatcctagatatttttgtgtacttaacaaaatcttaagtgatatctttacccttctcttgaacaatggaaggatagaaaacattttaactccatatgccctctcaacttgtccagttttttttttctgatttttttaaatcctgcaaatttgccattgtcttttatacagctaatgctatttagatttatccaatatatttatctgcatatttgcttaccattccttcttgtgcttcagggctttccatctgaaataatttccttcttttaaaagtatatcctttaagggctgggcatggtggttcacgcctgtaatcccaacactgtgggaggccgaggccagtggatcacttgaggtcaggagttcaagaccagcctgtccaatatggagaaaccccgtctctactaaaaaacacacaaaaattagctgggcctggtggcacacacctgtaatcccagctactcgggaggctgaggcaggagaattgcttgaacctgggaggcagagattgtagtgagccgagatcgctccactgcactccagccggggcgacagagcgagactccatctcaaaaaaaaaaaaataaataaataggccgggtgtggtggctcaacgtctataatcccagcactttgggaggccaaggtgggcggatcacgaggtcaggagactgagaccatcctggccaatgtgaaaacccgtctctactaaaaatacaaaacaaattagccaggcgtggtggtgcgcgcctaaagtcccagctaatcaggaggctgaggcaggagaatcgcttgaaccaaggaggcagaggctgctgcagtgagccaagatcatgccactgcactccagcctgggtgacagaatgagactctgtctcaaaaaaaagataaacttaaaaataaaaaataaataaataaaataaaataataaataaataaataaatttcttcaacaggagagtcattaagatacctggtttgctgtgctgctgaaaacagaattatgctctgtcattccttgactcattcattctagttgtgtttattatgtgcctgttacgtatcagtggtaggaacacgggcaaacaaggcaaaatcctggtgcataaggaacctacattctcgtgagtggagagagaaaagataatttggcaggtgaggttgagtgttaagaaaataaaacagagttagggctggagtatcagggctgggggaaggctttcttaagaagagggtaatgtttgagcaaatatctgatgctgggaggcagcagatcctacagatgtgggaggcaggtattcccggcagaggggaggcaggtgcaaaggtaagccgagtctggtgcatctggagaaccacatggaggtcactgtagccagagtccagggtgtggggattggaaggagcgagactggcgctggaagcaggggctagaatcacatgggaccttgtaatcagggtggggagtatcaataactgtgacagttgacaatagctgttggcaagatttgagtttagtagattgaaccagggtaactgagacagaggtggtgtgaagcggccacattctggctctgttttgaggtagaggtgatgttatgtggacatgagaggaggagaggagtcagggatgacactggggcatttgtcctgagcagctgtgtcctggaggagcccaaccgggggatgcaggagcaagaggtgggttttggccagtgtgtcggagaggcccgtgagcctcccagggggagatgctgagccagcagctcgggccatgccggatctggagctcagggagaggctgagtgaggaggcatcagcacgtggatggaattttaggtcacaggagggagagggtcacccaggaaactagtgtgcacagagaagaggaggctgagccctgggcaccacgggtgtgcacagggtgataagggcaccaattgggtgctttgcaggactgtccggaattacttgtctagagagaatgcagttaatactgcaggccggttatcgtgactagaagataaggctcgtggattcctttaccagaaaagcttggatttcatgcttacctaaagggaaggtgcccacgtgctgccttatcttccttttgaattttcaaaagcaactcaatcagtgtattcttatggcagaacaattaagtgatacagatatgcaaaagcccagactttcatgttccaccacccagagatgttcattcaagactcaggacaaccttccctgaccaccatatgtccaggtagaccctgtcactctctgtcccccacttggcttcatgctttcccccagcccttaatgctgtctgccgctacattacctactggtgtggctttgaaatcccctgacccctactggaatatatacaggggccttgtcacttctacccatcccgggaccccacaggcccagcgaggtgcctggcatacggtaagtaaggctgcattacatttcattgaatggaagaattcacatttttggtacatagccatctggactttttttctaggtaattacccactcttaaacatatatttttagataaagcccaagtgttcagctttttagacgtaagaatgctacttatggcgttgaatgttactgtaagctaactttgcactagttggctggggctgctgttttcagtcagtttcagcaatggtggctgcacaggccttcagagcccttcctgagcctgtgcctggacagcagcgtgaatcgtcagtccacctcatgctgtctcctaggaggctgtgcagctgcaggccttctttcctcaaccaaaatgctgtgcctgcccacctgcccactcccttccctccctccctctcagcctaatctggtatgactttgtcttatctttcctagtatttagacaatttgttcctttgtatcttggaggattgttccaggaccctccaaaggataccaaaatccatggatgctcgtctctgatataaaatagtgttgtatttgcatataacttatgtatactcttcagtattctttaaatcatctctagattacttataatacctaatagaatataaatacaatgtaaatagttataccgtattgtttagggaataatgacaagcaaaaaaagtctgtacatgtttagtacagatgcagctacccacttctttcccccgtatattttcgattcctgactggttgaatccacagatgtggaacccttgggtatgaagggctgagtgtgctgtgagctcctggaccgcagggcctgcatggtgttattcacttgttttcatttccatcccctagctcttagcaaggtttctggcactcagaaagtaaatgtttttagaatattgggagagatagatgtaaaataatttgtaaaatcaatttccttggcttgatatttactcagtttattagaataaattaaacattttattgaaaatatttaagaatttgggacacaggctatgtcttgagacagccaaactgacaaatttttatgaaggacaggttctttctgcctgtgtgtgtgtgtgtgagagagtgtgtgtgagtgtgtgtgtgtgagtgtatgtgtgtgtgtagtgggggtattgggtattgtaatgaagtcaagagagtaaccaagacattttcttcagggcttctcagataatattattgtatattgtaattcggcattttatcataaataagaattgtcattaatttttcccctttataagtggtcactggaaatgtttattaggcagctagcatcacaaaatgtgtgtgtgtgtgcgtgcgcgcgcgtgtgtgtatgaggcttaacgttgaaggtctttgttttgtgtttctagagttctcagtggcacagctgagaatgggtgtgtaagtcctgcttgccaaagccatatcctccctgtgtggggtgggagttgccagagaggccaggaggagtcatactaggagcaagaaggctgggaaggctggagactgacattttcaggcactcacatacaatgtgtcatttaaattcctactctgtgtaggtcagccacctttattcccattttgctggtaagaaggtagcttagaagttaaaatgtgcacctattatttaagaaatgttttgtccttatagagacaggatcccaccttgttgctcaggctggtttgtaactcctgggctcaagcaatccttccacctccacctcccaaagtgctgggattacaggcgtgagccactatgcctgacccactccccttgtttaagggaaacttttgctattaattttatgcttgatttaagcctattagtttcagattgttgcctgacaattgagttccctgtttgtttttccaaattactggctagttcattttatgtgaactttttttagaaataaaagcactgtcaagttagaattcatttatcagtttgtcacacgaaactggctccatattcttctctacagtagagtgctttggctctagctgatacctttgaatgaaatagaatattttcttgagaaagcggcaccatagttgagtgcatagatgcccagaaaatatttgaaaaccaaatcctctcatggtttgtacttaaaatttttttttagagatgggatctcactgtgttgcccaggctggagtacagtggctactcacaggcactatcatagctcactgcagcctcaaactcttgggctcaagtgatcttcctgcctcagcttcccaagtatctgggactatagatagtcatgtgccaccacacccagctcgtgtggctttttaaacttcaaaggcacatatttatagtactggttgagaaggtatttaggtagttcacttctagatagcgcttctgatgggtgtgacctcttcttgtccatgcttacctagcattcttatggtgggcttttatcaggacattctactttttattgctggtaggtaaatggagcagaagtcactcttgtggtggagtaactagtgacttgagctggtgtctgatcttcagcgccctgccatttgtcagtcccctctcccctccttcacagccacagcagcttcccagggtttgccctccaggaccagcgggaccctgcactgggctggtttctaactcccctttgtcacacaggttcctctacctgggatgcctttccttgctgctcctgctgaagaattcccactgaaacatcagccctgggcaccctttctggaccctctatgtgtccccgtagcatgttgtgcagaactgtttcctagctcttggccgctgtgttggaggaggttgttcaagtgtccatcgaccctgtgagaatggagtgccccagtgtgggggcacctggcttacgggctcaggagctgggctgccgtggagcctggccccagtcaccttctccctggccaatgcttgtggaaggtccccatactccaggcactgtgccaggtcccagccggatgccatttgatccgtgcaacctgtcaggcagattggattctattttacccatgagcagtgtcaggcgcagagctcttaggtattttgcctgaggcagctggatcattaagaggtccccccccccacccccaggggtcttgtgaagactcatagatgcagatttcagagaccttctagatttgtgcatccaggctagcgtgttctttggtgttgtcccctcttgctgtctctcatattcagcttgttcagaccagggcttcagctcctcttgaggattccactcatcagactgttgggtagggaagagcctctgaaacggctgcctccaagcatgggaagaggccgctcctcttttgtggacaaagggccacagaggccctttgtgtgacaggaagtcctgcttctagaaggggctgcctgaaagtggaggggttgaaagaagctgaagcgttgacctggggccactctgactcatgcatgttgtcaataatactctttgtctgtcttgggaacctggcacagcagacctcgaaggtggcctggagcattcctcttctccctccttcctgctcactctgccgcctgtgaatgcccctattttctgacctgaacaaagggcagcctcctgacccattctatattttttccttctatttatgccaggagaatctttctgtctcatctgggcctgtgtgagttttcttttttagggtttaagtgcgtctcttgagttggaaaacttgcagcttaagggagagctgtcccactgggcaggtgcctctgacggagaggaggcgtcgtcgggaagtatgtggccgtggctgctctggcatgatcctgaagactggcacgaaggggaatggagccgcacagagaatttcaggcatcagaggggaagcgcaggtacccggacccacggcccagctccctgcaacatggtccacatgtctcctgtatttgtggccatctgtcagttgttaaatactgtggttaggatgtgaggacaccagaagcgagggaagtggtggcagagatgagctgacgcgtcctcatgtgctctgaagtcctgatccccagctggacgagagaggatcatgtgtgtgcgcatgcctgtgtgaagggatcctaagattatgttggaataacactgcatcagtcctgggcaggcagctttgtgtgttgtgtaactggggcttcttgctgtggggacatggtggcaaatcagtgagcacttgttctttttgttttttgagacagagttttgctctttcccccaggctggagtgcagtggtgcgatctcactgcaacctccatcacctgggttcaagtgattcttgtgcctcagcctcccaagtagtgggtgagcccgtggtacattgctgctctcgccaggctcagaggccaatgtgtgcctccttcctggatgcagtggcagtcagtgagtgcttccactcctgcccccagggacaaatcctttggctttattagctttgtccttacttcccccttagactgtggcaggtttggggtacccatacttctggagaccctaccctggattatattaggtatgttatgctcacatgcagtttaaacacttctttatgttataaaagtaattggaaggattcttattattttgcttttgaaactatttggctatgagaagttgatttctcctccacctcctctaattcatttgtgcatttgttcagagggaacagtgtgtgtgaaggggtggagctgataggagtgtggtgcttgtgttggtagacacaggtgattaacggtggccagagcgtgtatagtgtggccaggagtgtggtgtgagtggtgaggctggaggagcagtagttacagcctggaggccctgctggcttcgggaggaagtagggggaggagtttgagtagaggcaaaacctgatctttccagaagacattccaaccaccatggtagagtcacagtaatgtcatggagaatgaagggagtcggggactaaacaagtggctgcaggttagttaggacgttgttaaggattaggcaggaggcaatggtggccttagcgaaggtagctatcatcatggggacagagccaagtgggaggattcaagagatattgaagagctgatgtagtccggtcttggaagctgattgaatgtggtagtggtgaggggggttgggtgtgggaagaagaggagtttctggcttgagaagctgggtgaatgaatggtgggaccatttctgacgtagaaaacccaggaacaggagtgggctcatagggaaggggatagtttgcaaggactgtgtgatggccaagtggaggcatccagtaggcagagatgcgggtctgggccagacagcagatcagggggcttgaggttaaaggtggtttggtgtgtgggcacagaagacgtaagagagagggcctgggacagaacctggggagcgccagcagccaggaaacaggcagaggaggttgagagaaggcacactgcagccactacagaaatgagctggtgagtgtcagctccctccccaaagactcctcttgccctcgtcccccactgattttgcttctgtcagcttggtaattgccggtgcgtacatctagtcactgtgcagactcatttgagcatctacctcatgctaagcactggggatacggagatgacacagcccttgcctctttttttttttttttgagacgagtcttgccctgtcgtccaggctagagtacagtggtatgatcttggctcaccgcaacctctgcctcccaggttcaagtgattctcctgcctcagcctcctgagtagctgaaactacaggggcgtaccaccacacctggctaatttttgtatttttagtagacatagggtttcactgtgttggcccggctggtcttgaactcctgacctcaggtgatccacccatcttggcctcccaaagtgctgagattataggcgtgagccaccgcgcccagctacagtcctcaccttataagttgatgtgtagtggatgcgctgtgccactctgccttttttgcttatacccaatttcggatggaaaatagctcacctgctagttctctgtaacggatgtgttgtgtcctttctgtcaactcgtcattgttttcttagctttgagcagctgactcgtttccaatttttgctgttataaatattgcagtgatgaacattttgtccaagctattttttctttgagtttatttgcttggggcatgttccccagagtgggacttaagggtcagaggttggtaactgttatctgccttgttctgtattttcagatttttccatgaagcctattagcaatgttagagtacatttctgttttcctgtagccccaccaaaactggcattgtcatattaattttccttattttacaagttatttccatattttaaaggaagttgtgcttttttttcctgcatgggaatttgttgtattatatttagctaggttacattgcagtaacaagcaaaccccaagtctcagagacttagcctaacacaaatgtctttctcgcttgatctgtgtgtcccttgtaggatggctgggggtgcggttccacagagtccctcaggccaggctgattaaggagacagcactctctgagagctgccactcgaggcctgctcagtggacaacacagtagacaggagaggctgggggctttgtgtggacttttcactactgatgtggccaggactaccaacacagtctggcttagcaggtagaacttagtgagcattcctgtctctgcccagccatctcctcttctgtttgttcctctccagcaacttctttgtccagtggaattggatcctctgtcttcatatcagctcttaatgtattttaggtaataagatttttatcaattgtgtctttttctttctttgctttctatattgtattgtgcaaaagtttaacgtaagttttggacacattcatgttttcctctgataccttattatcacaaatttcttttctcaaagccagagaataagctgcttttctttgagttgcttaaaatggattttatttggctccttatgacacttgaaattcatcaaaatatataatgtcaggtggttttaatctaagttaattaggtccttggtgatgcctgttctgcaacattaaaacaaaacaaaagaaagaaaaaacacccaaccccaagcaacacctcttcatgacagaaacactcagcaaaccaggaacagaagggaacttgactggataaagggtattaatcaaaacttccagggctggcagtgaaagactaaaagctttcttcctacaatccagaagaataggaccttgatgtctgttctcactccttctgctcaatattgtactggagagtctaaccaggaacttcgaagttagacaagaaaacaaaaggcatacagattggaaaggaaaaggtaaaacactctctgttcaaagatggcatgatcttatataaagaaaatcataaggaatcaccaaaaaaactcttagaattaatatacaggttcagcaaggttgtaggatataagatcaatatacaaaaataacgatatttctataatctagcaaggaataattcaaaaaatggaattaagaaaacagtttcatttattatagtatataaagaataaaataggagtaaatttatgaagagaagtgtaagacttatattctgaaaattacaaaacattgttgaaataaatttaaaaggacctgaataaatggaaagagatcctacatccatggactggaagacttcacatagttcagatggcagtactcctcaaattgagctacagagtcacagcagtccctttcaaaatcccaaagcaacaagccaattctaaaatccctgtggaaatgcaagggaccaagaatagtcagaacagttttgaaaagtcagagaacaaagttggagggctcacacttcccaatttacaaaaatgtataaatctacagtattcaagaaacagtgtggtgcgggcataaggatagacatggaaaaatgagatagagtcaagaaaacaaaactaaacccctacatttatggtcagttgactttggacaaggatgctaagccagttcaatgggggaaagaaaaatcttttcaacaagtgacgctgggacaactggatatctgcttgcagaagcatgaatttggatctctgcctcatgccacatataaaacttaactccagatggatcagagacctaaatgtaagagctaaatctgtaaagcttttttaattaaaaaaacgtttaaaaaaattagtcataataagtgatgtaaaactcttaaaacatagcataagtctttgtcaccttggattaggcagtgttttcctagatatgacaccaaaacaatcaacaaaagaaaaaagtgggtaaattgaacttcataaaaattaagaacttttgtgcttcagaggatgttatcaagaaagtaaaaagacaactcagaatggaagaaaatagtttcaaatcatatatctgataaagataccttgaatacataaagaactcttgggtgggtgcattggctcacatctgtaatcccattactttggaggatcacttgaggccaagagtttgagaccagcctgagcaacatgagaccctgtctctaccaaaaaaattgaaagaattaaaaaaaaaaaaaaaaaagaactcttaaaattcaataataaaggccggacacagtggctcactcctgtaatcccagcactttgggaggcagaggcgggcagatcacctgaggtcaagagttcgagaccagcctggccaacatggtgaaaccctgtctctactaaaaatacaaaaattagctgggcgtgttggcccatgcctgtaatcccagctactcaggaggctgaggcaggagaatcgcttgaacccaggagtcagaggttgcagtgagccgagaatgcgccactgcactccagcctgggtgacagagtgacagagtgagactctgtctcaaacaaaacaaaacaaaacaaaaaccccaaactcagcaataagaagacacaccagtttaaaaaatgagcaaaggatctaaaccgacgtttcttcaaagatagtatacaaatggccaataagcacatgaaaagatacccaatatcactagtcattagggaaacacgaatcaaaatcacaatgagatatcacttcccacccactaagatggttacaataaaaaagacaacatgtgttggtgaggatatgggaaattggaactgtcacacactgctggtgggaatgtcaaatgatgcacctgctttggaaagcactctggctgaatgttggaaactcctgactttggaagtttctcattatgacccagcagttctactcctaggtatctactcaaaagaaatgaaaacatctgtccatacaaaggcttgtacacaaatggtaatagcagcactattaatagcggaaaagtggcaaacaacccaaatgtccagtcacttggtaatgggcaaacaaattgtggtatattcatacagtggaatattacttagcaacaaaaaggagtgaaatacacatgctgcaacgtggacgaaccttgaaccttgaagacattctggaaaaagtgaaggaagccaatcaccagagccacatgttatgatcccatttatctgaaatgtccagcataggcaaatccatagagacagaaagtagattagtgattgccaggattgggagtagaggaggtgggggatgactggggaagggtgtggggtttctttttggggtgatgaaaatgttctaaaatgattgtcatgatgtggcacaactctgtgaacacactaaaaatcattgtgtacattttagatgggtgaactgtgtgaattattatcttaataaaactgttagaaaaatagcaagaatctcaagtacttcacccatcatccctcccacagcctctcctggctaaataatcccatccctttggctattcttgacagacacatttgggtcttttccatttgtatacccagaattttattctttttgagcctcctaaattgtgacttccgggattaaacacaaagtcccaaggtaggggaggaggtggtggcggtggcaggggcttcaccagcttgaagagaagcagctgggtatagggaaacccaggacctggggtggcccctctccagcatgctagtgagggctctgtgccctgtcccagggcggggctcatattctggtggcactgcttctggtgtaactggctgaccttggagactgggcttctttccccctccctttccatgaatgtaaaaggaggagtggattgaggaggaagtttgagagctacctggtgtaatccgtattcctgttgacaggaacagtgttactcattcagcaaacacatgctgaccccctgctttgcacagcgtctgagattcagagatgaagacagtataaggtcacgatctaatgactcactctgcactacatttctttccttctattgtataaaatagaaaaatctatttttggtgtaaaatgacatcctaattactgagtagttaaggagtttgagtttttaagcccgtgcatgctttccacttggttttactgtttgttctgtaaggcgctgtgtaggaatagtactaggtaacatctgtggagctgatagcaagcattgtcccgctcctgcctacagccttcggaggagcttccctgcagcaggctgctggatgcagggggccgggggaataattccattttagaaacccagtaattgtgtctggtgctaggtagaattttccttcattcagtagtttattgaaggccgggtagacgccgattgccactaacatgcagtctctagaagtcagggactttatcttgcacgctgccatctcctgttcctggaacatcgcaggtgctcaagatgtgttaattagcgaagaagcaaatgactagaggatgcagtgataatgacctttcgttcaccctgagaactaggctggccagggagtgtctctccctcttgtaggtaaggaaacaggctggcaggaagtgactgcatagagttaggcagactgtaaaagccagagcgggcacaagaatccaggtctcctgactccatccttccattgtgtgttctagtcccacccaactttgaaagcaaaagttgttatatatttctgttaaaaacgttgccctgtgggagtgcttcccattccctctgtggggttggctccactggaatggggaggggaggagctgtggagttgcatcgttctggttcagttaggcctgctctaactgcgtcacttccaatcattcttctttcaaatctttagactcttgtacatcttcttacactactgtttgaattctcatgttaatatcaaatttgaaaaagtgtcatttttgtcctttttaaagtaagtttttctgttttaaacctctggaacatcaactgagtatttaggttggggaagtgttcagcctccatctccacattcccagggtgcttgccaaccagaggctaaaaaaatattgctgtaaaaatcagtccaaggcaagtctggatctgtcagctgatgtgttcccattgcataagataaacgagttttggggacacatctaattacacgctgttagctccagctcttcattaagttgcataggtgagctaagagctgatgggctgcgctgggacgggtgaccttggggcctgtcctacctttgctgctgattctgatagcccaggtggttgtcagctggagcaagcggtctgaatgccaccaggatggctggtcatcagcttgtttcctttgacctataaagatgttggggaaaacatggttattttaagggttactatatgaatctgcatataggatttttaaaaaatacaaatttgtcacagacagcatttttaccttctccacctcgggatccagcacaaacagcacctcctctcttcccttcccttgtcgtcttctcttgttacttgagcacttgctttgggttagataaaaagggtgaagcccttccctcgtggagctccaggtggagtgggagaaaggctcttcaccagccaggcacgggtagcacacaccggaatgccactgtgccaggctgtcgagagggagatggtgcaacctaaatggtcctgcggaacatgcagttggcctgtgcagaggcattcttcatgtttggacagcctctgcttgctgtggtccttggcacacagcacacacctggtgagctcttcccatagaaaaagattccctacctgcttctgagccactgctgctgtgactgaccttcctttcctctaaggtcatgggaaagggagaaggtcaggcttctttctgacgcctcctgtgtgttccagaggggaggattccttatgcagtttctgcatcaggggcttccctttcttcttcaggccaattttaagaataagattaattggcatatctttctgtgggatcttcagaaccgtgtgtgttttcatcctcgggttttaggaattcactgcctagcattctctattcataccttctgctgcttcgcgagcccaggaaacaacttggaaactggatctccagtggagagagtgattgatttcaaaagaccttccccaaacttacctcaagtgattgcttggtttgtttcaaaaagattttaaattttgctcgacttaaatggcagtcgtttttagggctgtcatctagaatctagtatttaacatgatgattttgttttactctgtacaactgtgggtagagggcagggagcaagttagctgggaaaaatcaaccaggcaggcgcaggtgagacttctaccgctgtcattccagagttctccagtgggagattgaagccttctggagatgggggtccagactgctcgagccaggagaagggtccccctgcggggctccatgtctgtgtgactggtcttcagatcgtgtgaccccctagggatgctggactttgctgttctcggagctgcatgggtgccatggaaagggctgggagccagtgtccctgctcctcacccacagtggggccttggttgagtctgagggagagccgagttaggggaagtgcaggatttgtggccaggcaaggggtgtggtaagtgaaagcacctcgtatgctgactcacatgcctgactgcttgcacagggctccttgagaatgaggccgtgtggagattcagtgtgtggtagtcactgcacacaaccttggtgatcgagccgggacatctaggcaggggctcagaggtggactttggtggtggggctagaagttgaacaaagaggtcattttgttttgtcttcggtgcccgtttaagctcatgcatcgttatttctactgccgcctgcctgggctcacccacagccatctcaccaggaactgctgccacacctgtctttctgtgcctcagacatgccaggtgggcctctcttgccttttgctggggctgcctgtgctctgggggcccatatggcttacttcttcccatgttgtctcaggtgtcaccttctttggggaccttctctggtcactctgtttagaagcagtctcctttctgtctcctccctatctcatcctcgcttatttctctgcatagcacctgctgggtcagtcacctgtgccagaacacagacccatgagggcaggagttttggtctgttctctccgctgttagattcccagcattcagaacaccgtgtggctgcacaggcacccaatatacaggtgttgaaagaatggaaagtaggcattggtgggtagattactaatgcattcgcaatgggtgtaaataggtatttgctaatttaatttactgcccctgcccccccccctttttttgaggcagagtcttgctgtgttgcccaggctggagtgctatggcatgatctcggctcactgcaacctccgtctcgcgggttcaggtgattctcttgcctcagcctcctgagtagctggaattgcagatgtgtgctgccacacctggctaatttttgtatttttagtggagatggggtttcaccatgttggccaggctggtcttgaacccctcatcttaggtgatccacccagttggaccttccaaagtgctgggattacaggcatgagccaccatgcccagccataaccccatctttatttctgctttgatatatgtaaaagtcttttttctttttttgctttgatacaaaatgcatactacatattttcacttaaaccagtccatcctttgcctttgcctatgcttcatgtccccttagaatgtttgagtcttcataggacttaaagatcatctgctccatgaacaagggaactgaaggtcagaggggaggagtcttgtgctaagtccggggtcattctgctccatctccttccactgatactggagccagggaagggaaccaacatggattgtttgccagatgagagacaggtatttccccgcatgatctaagtgaatcctcagaagtcacagggtgtgcattgtcatccctgtttcatgagtggaattctgtaggatttttttttttttttttgagacggagtctcgctctgccgcccaggctggagtgcagtggcgcaatcttggctcactgcaagctccgcctcccgggttcacgccattctcctgcctctgcctcctgagtagctgggactacaggcacccgccaccatgttcggctaattttttgtattttttttagtagagacggggtttcaccgtgttagccaggatggtctcgatctcctgaccttgtgattcacccacctcggcctcccaaagtgctgggattacaggcgtgagccaccgtgccctgctggaattctgtagttttcaacaggaagaatgaagtgatagaatgtacctgggtaacgtggccagtaagacttgatggctaggtcatctctcaggggtgccatggagcccctgggatgcctgggactctctgagctctccaggtctcatgctgtctgagggtgctgcttgtggggccacctgtgttccctcgggaccagtgtgtttcagtgtctggcccgtgaacctgttctcaagttgcccttgtctctgtggaaacactttttcctcgaagccagtatttgggattttggtaacaagccaaattgaaatctcagtgattataggacttgatgaataatttgtgttgcaaaagattgaaaaatcatccctcacgaagtccattttaagtgttgcctaagtacagttacttcattgaaactgctcaccagctggtggcaaagcttatgtggaaacaagttttttggtgctctgaccctagacaagaccatgagtctggagccatgtccacagtaggtctccgcacatgtggaagaggggcagtctgtgcaggagagccttcttccccccaccccgccccatgggaaaaggagagaaatggtgagttaggtcaggggaaagggaaacagggaggaggcaggtcctcgataatcaggaatatggcgcagacactgctggactctgaggtttcctaaaaaattcatgccctgggctgggcacggtggctcacgcctataatcccagcactttgggaggccgagacgggcagatcatgaggtcaggagatcgagaccatcctggctaaaacagtgaaaccccgactctactgaaaataaaaaaaaaaaaaaaaaattagccgggcgcggtggcgggcacctgtagtcctagctactcaggaggctgaggcaggagaatggcgtgaacctgggaggtggagcttgcagtgagccgagattgcgccactgcactccagcctgggcgataaagcgaaactctgtctcaaaaaaaaagaaaaagaaaaaggaagaaagaaaagaaaagaaagagaaaagaaagaaaagaaatccatgccctggctccattttttctttcagtgaccctcactgaggagctgtgggtaccgtgataggcactagggaaggcaggtgactcgagtatggtctgatctaccagggttaacaacttggttggggaaagaggaatgggggccaaataatggcaccatagaggaactataacgggacagtggtgggcaaagggtcactagaacggtggggggcttcttggaggagatgacactcaaactgggccttgcaaggtaggtgggagttgaccagcaaggcggcagtctcaggtggcagtgtgctgcacgtgtggctatcagggccagcccatgaggggcaaggctgctgggcaggctgggaagccagagtggggaggccccaggaggtgttctgtgtgcagctgccacattgaaaggtgtgcaagtgtagttggaggatgtgcagctgaggcagggcccaaaggagggggagtacacagaagccaagaagggaaaagaagggaaaaggcgatctgcacacacacagtgccttgaaggtcttgcgtttcccgtagaaattgtgctgtagctctttaccagattgactggtatttgggcacacagttgagcatactctgggcctcggttatatgttttgaatttagtatggtttttattcaaagcctcagtgctctctgcacgtttccatactcccatctcaactctaaaacatataagttgttattcagatcaacttgctggtaaaattagagaaaatttcaaagctcctttttactctctttgtctcacatttctccaatggggaaaaagcctggaagacaagtgtgttaaagaactggctgttcttgtaagtatttgaggagaacagtgtgagtcattgtagcttttcactggtatttgagtatccggtttatttttaaacagttctgtgaactggagtttcttccatagtttctgttaccatggcgccataatatttcctcgtctgcttgttcatactttcacacacttcagcatcacatttacaattccttacaatcagaatatcttattcataacttccaagaatgtttctccagctgcaatagcatttttctccaaatgggaaaagtccgttgttctgccacttgcagatgctgggaagaaagagggtctggttctgtgaaggacggtgcagggtgcgggggctgtgagggccccgttggggtttgagtgggtggacctatgtcatctgtgtggagccacttcccctttaggcgccacggttgagagtataggacggacaggctgctgcttttgcttgggaggagttggtgttatacattttggtctagacatctaacagaccacccttggttctttggtcccctcaaacatgaacatgggtgtgttctgttgctcttatttattttgtcatttatttttggacttgaattgaggcttccactttgggcaggtctcttgttttgagaatctgcagtccagagaaaaacaatgctgggcttggcagtcactggtgaagtcggctttgcccgccctccaggcatgcaggattattcagagaggtacctttctacatctcattgctttgagaaatatatatttcttaaagagttgttcaggatttaaggaaagttggggaggtatatggaaccatagagatagtttgtttccaatttcttaaagtcttagacctcaacttttcagggataacaaggttttcctctgacacataaagataataatagactaggttctgaatatgtgctttggacttaattatgggaacttggctttgccaggtgttttcaaattctactgtaaatataaatgctgattcaatgatacagcaactcttgatacttgagaatttaaagtgctgcgtaactgattggacatttcgtctcctaacacagttggttcctctgattcagagaggacccctttttgaagatcaaaagcaaaataaaagtgtggaaagtgtggacttctagtggcatgtggacaggggggtgtcctgggggctgcccaggaggctccaggtgggaagtgcttctgacttagtggctctacaagctggccattgtggaagaattggctttttccttttttttttttttagaattgactttgtaagaatcatcaaaaaattgttttgctctcagctcaataaacatttgtagttaataatccgagtaactaatcttttttctctcctgtgtaatccaagatatgtcagtatatggtcttcgtgagtaaaattgataccaatagtacattatcctaaaggtcttatttgatatccttttatcaagtcaacactttactgtcccaccatttcacttgtaaagatccccaagtgtgtcgctgtcagtttcaacaaatgttagaaaggacctgttgtcatatgtgagatacgcttctggaattcactgtctagaggggaaagcagactgtacacaggtaaaaactgaggtagtggtatgtgctttgaggaaatataaaaagagttagaaggtaacaggctagagttggtggtggtgggaggtgtggctagattctctaagggatgccccaaatggtgtgagggggagccggccatacgcttgtctcagggaagaacattcctggcagagggaacagcatgtgcaaaggctctgaggcagggatgagcttattatgttgaagaaacagagagaagatcctgtgctgggacagagaagggccagcaggtaagggagagtagttggggaatgggtggaagggcaggcaggggccgggtcatgacgggatttgcagtacagcggaggagttagggttgaagtgatgtgatggtttagagaagggaagtgacatgatttgagtatttacaaatattgccctgaagaggctagaaactggaagtgaggataggttttctgttctctttaacgttgagtttccatgggaaaacattaaacgttttcattttagctttgaaaatttagggttattaataccacctgtgttccttacaattgggggttttgtgacattttctgggctgttttggaagagagggattgtgtaagtgaatataccctggttgttaaccataataataacaacgtgatctctgcatggctctgttaaattaaaaaatgtaactattaatagtgtgtgaaatagttctcagcctagccagcagctggaagattacacattatgagaaactcatcaagtttaaaccacatggggatttctgtgtagaaatataccagttcctccttccttcctcgctgttcctgtttcagggcagccatcggctttgtggagccctctgaaccctggctggttccattgacgctgactgtgttcctccactaccttcccatcacctaaggtctcttctgtctcggacacctcctgcctctcccactctgcacctgccccattcccatccaaggttcaccttggtgtcgctggcttggaagccatttcctcacttccctgggtggaaagcagctacttcagtcctccaacaatcccaaggagtggtaggcagtgttagttttgttttctggatgaggaaactaaggttcaggaaggttaagtaacgtgcccctggttacccagctggtttgcagcaaggctgggattcattcattgctgcttctcacatatcattgcctcgtgtaagccaggtgctgtgcccagccgtgggatacaactgtgaacaaggcaggtgtgagttaggtgtctgcctccctcaacaccttgagctgtttgagcaggcaggcgtctggaataggcatgcagtgaacactgagcgaatgaatgagtgaatgaaagaattcctgtcaacattctactcttgttggactcgggttggcatgctgcctcccttagcatccagcctgtcactcttcagagtcacgcacacgtgactcacctctgcctttccttggtgtcttttgttgcctgtgtctcatgcaggaggcagcacagcctggtggctcagggaggctctggagcacctggtctgggtttgaatccaagctctgccccttactagttgtgtgacttgggcacgttatttaaacactcttatgcctctgtttcttcatctataaatttacttttgaacttgaactgtcaaaaactttcattttttaattcttaaactttcccactgacccaaaccagattgagaaattggataaccaaaaccatggaggtatttttgctttttatgagcgtgccttttgttatttcaaaatgacctactttcatacttccaaatgcattttagaaacattttgattaatttaaaagacaatcattttcaaaattagtttattgaataactttttcccttgtttatgtggtgtgaacgtgggtatccatgtacttcttgggtcaggattgagtgggtgcctcatctgtgctaggctctgcgtgagacacgaggacaggagggtccagagaaggtctgagagctgagacaaaggtgctgagtgtgtccagggcccaaacccagaggtcctggtgctgctgcatgttgtggctgtggaattggggcagagagcacaggtagcaggaaagtgtgtgagttaggctgcatgtcacagagaccctcaaaataatagtggcttaaagagaagtttattcctctcatctgcagagtccagaggtggcatggctggtgggcacaccacactgtcagagacctagacttcctctgtctcgttttgtgcatggctctgttcccaagtcacctcatggttcgcgatgagaaaagcatggcattcatatttaacacggcgaactttgtgctaggattgggacacaaaaataaactccatgtggttcctgccctcaaggatcttaggtctcttgggagagacagatgcctggatgaccgccctccatctgaggttgattggaaggagccctgtgtgagaggaacacaggcaggcaggccaggcagcagagctgacatttgggaataaaggaagtctttatgaaagaggtggcatctgatcttgatcttaaagaataattagtatcttgacactcatctgggaggctgtttgagggagaaggatactgtgaagggaggtacgaagacctgaaagggcagggctctgtttggagccccgggtggcgggtcactctcctgccttgtccgagttgaagtagaccatcattctggagcagacgtcacacaattggaaagatgtccccagctgtgtgattagtatgacatccattctaaaaggtgaacaaaagaacctggaaagaaaccagacaggatcgttttggagttctgagatactcattcttttgcctgtactttggaagcaggatcaagccattcgtaggcacgccactcccactgaacatttcacaatccactgagcccagtgctgtcactgtgtttcagttctcagaagctattgacagcatcttcaatgagaagtcctgggacccagagtcagagcactttttactggttttgcaagatacaaatattaattgctgttgactttccctttaaattttagcctctgtatgtgggcaggacttgtagcatagatgagaccttgtgttaccaacattgtaagtaatttatgtgatgtggacgtgcttgggaagcatggactttctttatgctgactgtggcttgtttcacagtgagaccctgataatgagctcaagcccggacattggggtcctggtgagtatagttgcacagggcggccgtcaggcctggatctgatgaagtagggaggatctttgcagccatgctcactgcacatacacactcttataattactcggctttaattcacgtttattcttccataatctcctgcttataggaggctgtcttaaaacattttaaactcagagaactctaagagcttgttgaatcccactctcttcttttcatgtgaaagtagttggatgctgagaagataagggacttgcccaatgtcccattgctgtttaatggcaaatttgggatgaggcttctaaattttggcactgagagctctttgtaagtgtaaaaaatgacttcagaattatcaaaaatgaaattatgttcagtgtagctttattgattttgtttgtttagaggtatatgtatttgtgtgtatttttccttaaatttggtgttccaggtagggtatacccagtgattcccttcaccagcctgattacctacaagtgcctccaccactattttggggtgtacttcattgtcttcagacattaacaccatctactgagtttaatgagcatcagtccatcaggcccagtgaaacactctgacaacttacatattaaaggagtttcacatctaaaatttcacaaatgaggcttatgtatttgaagtttcttaaaaataaaaacaaaaccaacctgatttctgtactctgatgcatgaaattagaagctatgtgaggctcacctgcctccacagcaactgaagtcttgttttatgtgaacaccttcttttctttcctccttctgtccatttctgatgcatgtgtaagatggcaggtgatatttcatcgcctacagcactctcagattcagcacgtgaagagacagtgaatcactttaaggacttcagaggcagcgacattttttagccaaggtgtttctttgggccattttcctcctatgcctctccgggtgtgttcccgtcctttctcaagggtttatggtttgccccttaagtgtagattgaggatgtcagattgaaatcttgctctttaaactgtatccagaggttcttcaactctctttggaatgtgtgagccagagagcctcagggaaacagtgggacagaagtggaagctgcatgtgccatgacatccccaacctgggctccgcctgaggactacctggaaacccaaacatctggacatgagggctcggctcagtggagtatgggaccatgacatgacgttttacagccattaaaaatgactgaggccgggcacggtggctcacgcctgtaattgtagcactttgggaggctgaggcaggcggatcacctgaggtctggaattcgagaccagcctgaccaacatggcgaaaccccatctctactaaaaatacaaaattagccagacgtggtggtgcatgcttctaatcccagctactcgggaggctgaggcaggagaatcgcttgaacctgggaggcagaggttgcagtgagccaagatcacgccattgcactccaacttgggcaagaagagcaaaactcagtctcaaaaataactaactaaataactaaataactaaataaataaataaataaaagactggggccaggcgtggtggctcacgcctgtaatcccagcactttgggaggccaagatgggtggatcacttgaggccagaagtttgagaccagcctggccaacatggcgaaaccctgtctctactaaaaatatttttaaaaattagctgggcatggtggcgggcacctgtcgtcccagctactcgggaagctgagacatgaaagttgcttgaactcgggggcagaggttgcagttagctaagatcgtgccactgtgctccagtctgggcaacagagcgagactctgtctcaaaaaaaaaaaaagtaactggaagatacccagacaacagggagaaatgctgcttatgcagctgaggaaagcagaacacaggatggcttgttggctgcaaggacagtgaagtcagtccatagatgatgggagaagcaagggctaaatgaggagagcggaggctggtgggacagaactggccatgaggagcccctgttggccttgacagctctgtgctagccaacatttggacttaaaatcatcatgggcttggcagtgtggggaggctggaaagaggagagccagaggttctcctgaacaggaatcgtgagcttcagagctgccgaggagcccagccaggtgtggtaagcagaagaactgcactgaggttgctctgttgtttgtttttccttaacctcctccaagcatttttttttttttaagagatagggtctctctatgttgccgaggcaggagtgcagtggctattcacaggcgtgatcatagctcactgcagccttgaactcctaggctcaagcagtcctcccacctcagcctcctgaggagctgggaccacaggtgcactcagctccagaatgatttttttttttttcctgtgggaagaagagggcttggtctgtcatgttgagtgaaacaagatgtgttttcccccctctctttttctcttttcttcttaacagagatattggagagtctgtgctgtgtttctttgaagtgattctgtgtcctcgtggagttcctaagattccccttcctcccactgtttttcttcagtttgcagtggatagttctgtgccatgaggtggtttgaaatcctctggttttcggtgatggtttctatagcaacaatgagttgtgtctgcctggagatgctggctgtttttttaatctctggaagcacctttgagtgtgttctgccccaccctgcccaggccgatgggtgcttctggagggcctaggacctgctgagctctaggcctcagtgtgattcccttgagggaggggccagcctttaagcccaagcatcttgcaatgcgcaagctgtttcccgttgttgaatcaaatgtactacaccatgttccagagagatataagtcactttatttgctgatctcttatctcttcctttgaggaatgttcacttttccagatgaaatcactggaaacaaaatgagttgtgccaggtagttgagctcttaaaaaacatcccagctttgctaatggtgcaaagcactatcttaatgtgggccttacttcctgagcgcccactggcttatagggggtgacctgggtggtagagacaagcaagagaccccattcttccaggagactgactggacatacatgaatagcccgagctgagccaaggctggtgacatagagggcccagggacccatgggccgcagctgggttgtcaggcagcaggagggcctcccgtgaggccggtggtagacaggcagggtagaaccacacagcccccaaccgtggttgctaaacccatgtgtggtttagattaacatgtgcagtagtgtttacgaaagaattctaaccattagagttatagcaccttcacataaatgctctcattattttccatctttgaatcctcagtctccataaatcaaaattacccaggctcttcaacttttcttgtcctgaattcatccagcaatttacaaagcaactgctttgtgtttgacactggatgctggggctgtagcagtgatcacagctgacatttgtccctgccctcctagagctgatactttttttttttttttttaaagacggagtcttgctctgtcgcccaggctggagtgctatggcgtgatcttggctcactgcaacctctgcctgccaggttcaagtgattctcctgcctcagcttcccaagtagctggaactacaggcatgcgccaccacacacagctaatttttgtatttttagtagaaatggggtttcaccatgttggccaggctggtcttaaactcctgacctcaagtgatccgccagcctcggccgcccaaagtgctgggattacagacgtgagccaccgccccggccctagagctgactttctagagggtcagacagacaagaaataaaacatttaagtaaattatgtagctcgttaggaggtggtaagtgcttgggagagaaaaataaagcagggagggggtctgagggggctggggcagggttagaaaagttctcactggggccggacgcagtggctcacgcctgtgatcccagcactttgggccgatcacgaggtcaggagatcgagatcatcctggctaacacaggtgaaaccccgtctctaccaaaaatataaaaaattagctgggcgtagtggcaggcacctgtagtcccagctacttgggaggctgaggcaggagaatggcgtgtacccgggaggcagagcttgcagtgatctgagatcgtgccactgcgcttcagcctgggcgacagagctagacactgtgtcgaaaaaaaaaaaaaagaaaaaaaacctcactggggtgggggctgatacaggcctgtggggcaggagggagaccatttcagggaggagacgagcacattcactgtgcctggcagtgcccagaccagcggaggagccaagtggagcttggtgtagggtggacagcagtggtggcgggttggagagcagggtctgaggacaaagtagctcggtggaggtgagcagatgcgggctgggaggacctgggcttttactctgcatggggggcttaagagcagcaatgtggtctgccttgcattttgagagggtcacactgttcagagtggactgaagtcagattgttaaatatatcatgcattgagaaagcatgcagcagtgcatacagctacagttgtatgtacaagtatgaaattaatatgttctaatttttaaaaacagtagcacagatacaaaacactgagttactgtgggaagctgggagctctgttagagggaagaagactgcagccacacaaaggagaggtgatagtggcactgacagtggagagatgcagggggtctggtcatgtccttggctttttggaggcaaggccggtccaggaggtgctcatggacctcccccgctccctaaagctggggcctgggggtcttgtgggaacctcccttccttctagtatggggccattcatgaaacaaagtcgggtattctccaggattttttttttttttttttaaagagaccaggtctcgctttgtcacccagattgaagtgcagtggcacaatcgtaactcactgctgcctcaaattcctgggctcaagcagttcccctgcctcagccccctgagtagctgggagtacaggcgtgcactaccacacctggctaattttattttttaatttattttagagatgggatctcaccatcttgcctaggctggtcttgaattcctggcttcaagcagacctcccgcctcagcttctcaaagtgctaggattacaggcatgaaccaccatgcccagtcaggataaatttttagaggaaatagttgaggccgggcgcagtggctcacgcctgtaatgccagcactttgggaggccgaggcgggcggatcacgaggtcaggagatcgagaccatcctggctgacacggtgaaaccccgtctctactaaaaatacaaaaaattagccaggcatggtggcgggcgcctgtagtcccagctactcgggaggctgaggcaggagaatggcgtgaacccgggaggcggagcttacagtgagccgagatcacgccactgcactccagcctgggcaacagagtgaaactctgtctcaaaaaaataaaaaaaagaagaagaaggagaaatagttgaagatgaagtagcttagtggaggtgagcagatgcgggcctgcgggccaggaggacctgggcttttactctgcacaagggacttaagaccagcaatgtggtctgccttgcattttgagagggtcaccgtgttgagaatagactgaagtcggattgttaaatatatcatgcattgagaagacatgcaacagtgcatacagctacagttctgcggccaattatgaaatgaatatgttctcatttttaaaaccagtagcatgggtacaaaactctgagttaccatgcagcttatctatgatgccagattagtcctttctaaagtgcaccctgccccacagaagcatgtgagcttccgctttgttgggtgctgggacagccacaacactcactccctctgcctctgccggaaagacccctcccctgtccttctcatgcccactgcccatcttcctgcagtcctcagagagctcgcattctatctcagtaagcccgccccacccccaggtcttttagagtgccctacttctctgtgtcctggtgcttttcacaccatatagctgtttttactttgctgtgtgccaatctgccctagtaggatgtcagccccaggagggcagggacccagtctgccttgtccactgcccctcccccagcttagaagagtgcctggcacatggtagatgttcacatggtaaatatgtcccttatcaaagggccctctcaccttgggcccaaacattggcttagaataaatcgttatttcccaaccactgaagaatctccccccagatagtgaagaggaaacgagctgcaggtcagcctgtgctcagtgcaaggcctgtggagcggccagaacccagccagccaggtgtgctcgggccgtggcagcgaggatgtccacctctgcctacctctgcagttagaggattagagcggggtatcgggggctttctcccgaggccagctttcaggagagatgagcaacatggtctttttactcagaatgttcttgctttatgaaaatagccttttggcctaaaaaatgacctgttcttttgtctggttgtggaataaattaagggtgttaagggggagctggatgtccttgtgaatacatcatttgtttacctgatatctgttatcaagcccaaaggggaggaaggaggttatgccagcttccagcctgtgccacggtcaccttagcaacctctgttaacctctgagactctgcacaccatctaaggaatggctctgactcactgtacttacatacattgctggcagaagtcactggaatctgagatctggaactgttttcaatacctcagtcattcccggattcccagattcctgagaagtgccccttagaacaaaagggttgggtggctcacacctgtaatcccagcactttgggaggctgaggcaggtggatcacctgagttcaggagttcgagaccagcctggccaacatggcgaaaccccgtctctactaaaaatacaaaaattagcctggcatggtggtgagcgcctgtaatcccagctactcgggaggctgaggcaggagaatcgcctgaacccgggagacggaggttgcagtgagctgagatcgcgccactgcactccagcctgggcaatgacaaagcaagattctgtctaaaaaaaaaaaaaagcttctaaatgaagtttccaaaagttagaaaagctattttctggctcctgattgctcccttttcatagcagcctgtttgtgttttatgggtacataacccttgagtctctccaagaattctcatcagatttcattagaatttctctcttgttccctcaagtatttgttttcccctgatttcagtttgaactttatgaaagggtagggctgatggcataggaagctgagctggttccctcttggcccttcccctaaatgggagagtggccacatctctgtaagagtctgggcaatgccccaggtgggtttccctgaaagtcatctgtacttgatggcttggctccaaatgcagctttttttttttttttcttttttcttttttgagacggagtctcacactgtcgcccagggtgggcgacagtgacacaatctcggctcactgcagcctccacctcctgggttcaaatgattctcctggctcagcctcccgagcagctagaactacaggcgtgtgccaccacgcctggctaactttttgtatttttagtagagacagggtttcaccgtgttagccaagatggtctctatctcctgacctcatgatctgcccttctcggcctcccaaagtgctgggattacaggcgtgagccactgcacctggcccaaatacatttttaaaaatgaccctggagcaggcacagtggatcacttgagcccaagagttcaagaccagcttgggcaatacgacgaaaccccgtctctactggaaaatacaaaaattagctgggcgcatgcctgtggttctagctactggggaggccgaggtgggaggatcacttgagctgaggaggttgaggctgcagtgagctgtgatcacaccactgcacttcagcctgggcggcagaccgagaccctgtctcaaaaaaaaaaaaaaaaaaaaaaaaaaagtgtgataattcatgataattgaccctcacccctgccactcacaactttgcatttctcaaccctgagcttggcgttcctaccctgccaaggcctgtctccagcactggcgtttttaggtggttttcttctcctggtgcacacctggctgctctcttccagcacgtcctccaccatgggcggtgcggccttgtttctgcgttgttacagcttccacctcttaattcagcaggcctttgggaggaaggagaaggaggtatgtttgcctcccttgaatttgtttctttccaaaaagtgacactaaaatagccatgctgtaatgtcattattttggaaaagaaataaattcagaggaactacatgggaaacatattttcttacatgtttttgccattgtgatgggaaagaatccagaataactcagcacacaccaccccattctaaaagtttatttcaaaatcacttgttggaattcggatggcatgcttctgattcatcttgcatggcacccagggtagcccgtgagagtgagttcaggtctggagtgtgtgcaggaacagtctccctcacgtgtagcccttgttcagagttcacagaactcattcagcattgaattccggtattggagctcagtttctttttttcttttttagattctttcttatttttaatttttaaagttcttttagagaccaggtctcactctgtcacccagcctggagtgcagcagtatgatcgtagctcactgcagcctccagctcctgggctcaagtgatcctcccacctcagcttcttgagtagctgggactacaggtgtgtaccaccacccctggctaatttttcttttttttttttttagagatggtggtctcactgtgttgcccagggtggcctcaagtgatccacctgctttggcctttcaaagtgttgagatttccaggcgtgaaccaccgtgcctggctgagctcagtttctttttctttttctttctttctttctttttttttttttttttttttttttgagacaggttcttgctctgtcacccaggctggagtacagtggtgcaatctcggctcactacaacctccacttcccgggttcaagtgattctcctgcctcagcctcctgagtagctgagattacaggcgcatgctaccacacccagctaatttttgtatttttagtagagacacagtttcaccatgttggccaggctggtcttaaactcctgacctcatgatctgcctgcctcagcctcccgaagtgctggaattacaggcgtgagccaccacgcccagcctgagttcagtttctttaggaagaaataatcagtcaaccactgggtgccagacagtctgaaatgtgcaaaagaagtgccagatgagtccctgtccttggaaagaccagggatgactcatttgtctgtcactttgcactttctcaaaattctttcacagctgtcgccccgagcctcttaataccctgggaggtaatgagagcccatgttgtactgccttacagacaaggacagtggctctcagaggggacaaatagctgaattacagaggtggagctgagactcattttcgactcaatatcacactctcttcccaggaactttaccttccagatgagaagcccccaattaattattaaatacacattttacatattttttgcattaataaattgatttccaaaggctccagcactgtttggcattaaagagcagcttgtcccatacgtgtgcacaggtatggtaaaggtcgttgtagtcggctcaacctggaagaatgaatgaagcagagccaggaaacatgccctacctgacctcgttttgaagaaacaatcgctctcagaagcctctcagtctcctcagcttatgtgtttcttcagctgagagggtgctgcaagcagattcatttttatggttaaggacatgtgtgtgtcaaaaaaaaattatagtagtacttcctgacaggcccagcgcctttggggatgtggtagagatcagggtcaatgtggaagccctgaggctccagcctccctggcaggtggtgggactctggagaatcctcctgccctttcttcttttcgctgccagagattgccggattctggaaatgcctggtagctgggcatgtggtgtcttgttggagttgggcagcgtggagtctgatggtctgggttgagtctcagcctagcacttaagagctatgggtctgtgaccagtgatttgaattatctgtatcttggttgccttttcatcaaatggaaacaataatacatcttttataggatttttgaggtacaaaaataatatatctgaagttcacctcacccatctgttggtgctgagaggtactgagtagctggtagctgcttggatggtggtttatcccacttctagaaaatttgtagcttgggctcccaggtggagcagtcttgcttggtttgatgcaaacatggcagactccaggcaatatagctgtctttgggggatataattcagtcatcaaatagcttttgaacactgcatggtgccatgaggcagctcttctagctccttggactccctatgaggttgagcatggctattctagggtgtggcctgtctgcagtggccctggtgtgcagctggttcctactcaggatggggtcatgcccaccatagcaactgttacctgcaaaggacatttttactttacaaagcattttcacatccttctcagttgaccctcaccacgattctgccaggcaagtggggataatattggtgcagtaaacattatatttaaatacagttgccctgggactgagtgttcccgtgcaacaaatggcaccattaaggcataaaaagatagagcatagccaggcagtggcacacactctgtagtcctagctacttgggaggctgaggcaggaggatcccttgagcccaggagttaaaggccagccggggcaacatagtgagatcccatctctaaaaagaaaaagaaaaagaaaagagtaccaatcagtgagggaaatgcagattaaaccaccatggcttactaacatcttctgaaaggccaagatcgacagactgtgcctggaaataggactatagcagtagttcatcacggcacaccgcagagcagtgcgtgttcacttttttttttgtttggttggtttttttgagatagggtcttgctctgttgcccaggcaggagtgcagtggcacaataatagctcactgcagccttgacctactgggctcaagcaatcctctcgcctcagcctcctgagtagctgggaccacaggtgcgtgccaccatgcttggctaattttttttaatttctactttttgtagagatgggatctcactatgttgcccaggctggtcttgagctcctgggcttaggcattccttctgccttgtcctctcaaagtgctgggattacaggtgtgagccaccgtgtctgaccgatatttagtttttcatgttatatgttctagaagatttgaactcagcactgaggtggttaagatcagtggttaagagcatgactgctgtcagcctgcctttattaaggtctcaactccgctgcttgggcaagctccaaccctttgtatgccccaggttccttgctttgacaatgcccatggcgaaaccgctaccccatagagttgttaggactaaatggagtgcacgcgtgtagtgcatggggcgcagtgtctggcacatgaggagtcgccataggggtgggtatgactggcttctttgctgttgaagaagggagggctggtggcaaggtcacagtggcaggtggcagcgtcaccaaaagtgcttatcccagtagcaacaatgacaggaaaacaaaaatcaaacccagccccagtcaccaacatttccgagtaccttcgggtggcttgctgtggtgattctaagaacaatggctatcacttttagggtgtcagatgtatgccaggtgacttcgtcactgctgggccttctccatgcctgcgaggaaatcaccttattgggttgagaggctgcctcttgagagctgctggtgtgtccctgcacatggatgccgtttgaagtcatgggagttccagagatcagtgctgggagggatgggaggagccatagagcggactgcaaggtgtgcaagcagttgggggaggaaagggaggcttgtcagggtgagagcggggagccaggagagtcccatacgctgaggctggtgcggcgtgccgtgggaggggtgaggtggttggacagggcccctgctgctcatatcccggagcaggggcaggagagaggggacttgggagttgtcattgagaactcagctcggtgcctgccctcaaggccccccttccccaccccccatccccacccccaccccaggttgttgctctgtgaacatcagaaatgagttcccagattggccatggttgtacaatcagttgggttttctttgtggtgcagattcttgtcccccaggtcctcccctttacctgcattccttgtgactgtggagctgaaggaagtagcaaggacactttgaagcccagggtgccggccaagaacaatgctcccattgaggtaggccgtgccacggcctgtgacctgggggtactgagaccttcatctcatttaaccttcactgaaacctggtaaagcacagctcaggaactggggttcagagaaattacatggctttctgcggtcacccagctggccagtggtagagctcggatttcccgccttccaccatcccaggccttccccacaggcacctcgtctgcattacgtcactgactctttgggcaggagactttcatttcttcccctcacagtctctgtctttttgggttttctatatcttgcctcagtgtcgccttagggcttcggatatctttgctagattctgactgcacagttcagtgagaccttgtataagatgtgcttagagggttcagatgaaagtagttgattgtgaattattccagctcaagaactgaagtggtggtgcagagcttcctaaagtaatttctgttgggtctgaaatgccttgtgcattttataaaaagatttgtcttcctaattctgttttacttaaattaataaagatgtatataatctcggagaatgtctaagttggaaggtgacagatttgtggcagggaggagctggctgagcattaagatgaactcttaagtaatgcacatggggatagttgagctgatgttattacagattgagctgtggccacaggggatacccgtggggtacgcttgtccctcattgcacctgaaggcattctacaggatgtcactgttgctgagtgcagtgctatgatgagatcctggtcccagacagaaggaaagtgaataagtatgggcctttcccagctctgccaccatgtaaccggagaatgtcccttccccttgctggttgctccttgttccttttggtcagctaagagcatatgtcctgtctgatgcccttggcagacccagaatcttggttatattacctctctcctcagtgattcaggctcttactcctaaaggctgcccactgtgctgagcctctccttggctcctggcacttagtgggctcttaaatcttaggcccggtgtggtggctcatccatgtaatctcagcaatttgggaggccaaggcaggaggaacgcttgagcccaggagtttgagaccagtctgggcaacagtgagaccccagtttccacacataaattttttttttaattagctgggcctggcagcacgtgcctgtagtcccagctactcaggaggctgaggcgagaggattgcttgagcccatgagttcgaggctgcagtgagctgtgtgatcatgccactgcactccagcttggatgacagacaagacgctttgtcagtcagtcaaccaccagtcagtcaatcaatcagtcttgtgcagaactgtgtcaagaccacagctgcatccagacagaatctgaattcctctgcccaagtggctcaggtgtcaagctgcctctcagtccggagcaggggcctgctcttccctgcagctgctcccatggctggccaggcagcccagctggtggcttgattgggccactttgagactcacctgagcccaaagccctgctattccctgagaagcctagagcagagaccagctgctctgggtagaaaactttctcctgctgaaacatggggtgaggcgactccaggagggccctggctagcagcataggattccatagaaaaaaggctcacacctgtaatcccagcacttcgggagggcaaggtgggtggatcacttgaggtcaggagtttgaaaccagcctggccaacatggtggaaaccccatctctactaaaaaatacaaaaattagccgagcgtggtggcacatgcctgtaatcccagctactggggaggctgaggcactagagttgcttgaacctgggaagcagaggttttagtgagctgagattgcactactgcactccagcccgggcaacagagccagattccacctaaaaaaaaaaattactgtgagaggtggcatcagggcccaggccaggtggcctgtccagcctctgtgaatcctagtggttcagatgacacgctgcccctatgattatggagcagagccctaaccagtgtgggagaacccctcactggagttctctccatgagagcctggttaggagcgtgcatgcatcttagtcctgcaacagtctcctcacagcggcaatgtctttggaggacttggctttgaagtaccgttatctgttgtggactttgtctctgttgctgcacagcagtgtgtttacctttaggagctctgcaatccaccagattaagcccttttaattagcaatccaattttaggttgtaggaagcctgatttacttaactttgagattgtttttggaaaacatcttggtgtaatggagagaatattaccttagcaagcaggcagagctggtgtcaaatactagtctccaccagccattacttggacaaccgtgggcaaattactgaacatcaattgtcttgactttaaaatagagacagaagtaatgatagtaatcataattactatgcaataataatagtggcaacaataattcattatttactatgttcgtagcacttactaagggtgtataacagtacttagtaagttcgtagcacttactaagggccaagtattgttctaagctcttgtatatatttgacttgcagcaattctgtgttgtaggttccattagtgtctctcttttttttttttttttttttttttggagacggagtttcgctcttgttgcccaggctggagtgcaatggcacgatcttggctgaccgcaacctccacctcccaggttcaagcgattctcctgcctcagcctcctgagtagctgggattataggcacatgccaccacgcttggctaattttgtatttttagtagagacggggtttctccgtcttggtcaggctggtcttgaactcctgacctcaggtgatccgcccgccttggcctcccaaagtgctgggattacaggcatgagccactgtgcccggcctattgtctcttttttccagataaggcaagcgaggcacagagagggtaggtaacttgcccactgttgcccacctcataagtaatgggtctgggatttaagcctaggtagtctgactctggagtctgtgtttcttgctccaattccaggctgtgtcacagagaatcatgaagattcatgtgattacatatgaaacaggacctagaacaaagtcttgtgccttgttggtgctcaaaacaagttggccattctgtctcaccccttcctgttgctaagctaaggctttagactgttgactgtggcagtgaggaaggtcttggatctctggctgtgtgatctgaacacagggtaaggtaaagaaaggtggggtcacctttttaccaaaaagtcagacagtttcatctcggctgcggacaggtcatcacactagcaaggtgtggtttgtgcttatgggagtccttcagtttcttccctccaacaggggaaataattgccgcctttacccttgcctggattgtagattgctgagtctgttattcagaagtgatccatttagctttccagctgagccacacacagacagtgtcagaacaaactggtctgaatttgtggcttcagtggcggagtcagtaaaggtggagttgagtggggacagtgctcacacaagtggaatgtggtagccactctggagaggggagtagggtgtcaaaggtgggattacctccactcacgttttatcccgggtcctagccctaccagttaggtagagtaggtcgggatgggcaagcccagagatccaaggactctgccttttatgcacatgcacccctcgcccccatcacccaccatgcacacacacagacatacacatatgtgcccagagttgattagagtctactggctttctgccacctaaaggaaatattatagaccgccctgtactgaaggcagtgattagaaacgggaagttgtgaaatagagatgacttgtttctttaccttgggaatttaaaaaccactatgttatatgtttttcatttataggtttgtctacagattttgagcgttcgaagttgacccctgactaagtatactttgctgctccctcagcctttgaaaaaatgtctgtcacatatgatgattccgttggagtagaagtgtccagcgacagcttctgggaggtaatgcacctgctttcttccagtgaatgaagtggccaggccaatagtgtctggcaggccctttggtttttttggtggaggttgggaactgaggtgaacatacccccaaaccagccatgcatttgtagtcagacctagatagcagcagaaaaggtttggacacttgtttttaggcagttcaggtatgccttagccatcatcgaaggcagtgaacttaccttgctaggaaaggctgatacttaaagaggttaggggtgtttatgaaaggtcttggggatcaccttcctttttatgtttgccatggtgtgagtgggagagacagacactaattgctcagcttatcctacgaggcactttactgttgagttttatgtagaaacaaggagggctgtgatttgacatcatgctggacaacacaggcaagtggccagagggccaaatgccttcaaacttgctggagcatctgccgccagtctgtacccatgagtggccctcttcctgattggattatttttgtttttttgtggaggcggagggtgttgttcctgagtcccacttacttttccttcctgctagttaatggaaagtccatcttttttttttttttttttttaacagttgaggtctcgagagcgcaggctggagttcagtggcaccatcatggctcactgaagccttgatctcctgggctcaagccatcctcccacctcagcctactgagtagctgagactataggaagtcaatttttggtctaattttgtccctgtggcaaaacccctggagctttcttggccttcatggaaagaggctttgcatggccgggcgcagtggctcatgtctgtaaccccagcactttgggaggccgaggcgggtggatcttgaggtcaggagttcaagaccagcctggccaacatggtgaaaccccatctctactaaaaatacaaaaaattagctgggcgtggtggtgggcacctgtaaccccagctatttgggaggctgaggcaggagaatggcatgaacccgggaggcggagcttgcagtgagccgagacagcgccactgcactccagcctgggtgacagagcaagactccgtctcaaaaaaaaaaaaattatgtgttaactgagtacctgtagtgtgctaggcaagggatgtgacagactgagttcctgccctccagaagctggcttctgccacagcagaaataaatgtggaaaggcacagagcatgcaggtcctctctgctgccacccctcggctggtggcatccttctggaggggtgaggggggcacccagctcaaatttcagcagccggagaggcacatctgcctgagaaatatttcacttaagacagcaagagtgacaggagcagtgacagccaaacaggtcgccagccacatctcacagcatggcaggaggttggccgtgaaactagatgaagcaggaccagcagttacacgacgtggtttggaggtgcccctggaatagtgctagaattcaggactgcctttgcccccgcttgcaggtacaggttcacagtaatcaggtcccgctggctggcccccccagagaggctgtggcctcattagtgcaggagcgcttatggagctggcagcagctgtgagagccttcctgtgagctctccagcctttagaagtgcaggcccttgttctcaacactgaaccaaaactatagatagaaacctttccagttatggggagcctcttttttgtaactgtagtgacattgctggctggcaccaatcattccctgccttgagcttggtggtggtgcagacaggacaagcacactcaaaaggcccttccttgtgagggataggccaggagaggcaatggggacaggtgaagacattgctttggagccaggaggtctgggtttgactgctgacctgatcacttacttctgtgtatggctttgggcaagttactgatttttctttgccttcatttcccaatctataagatgggggtaataacggtacccatatcctagtattgtgagggttaaaagaatgaataaacgttaagtgttttagggcatcagggcaaggctggtgggggcccttccctctgacacgggagctgagggagtcggtgtgcacagtcaatgtctgttcctgcggtgcccttggcgacattgtcttcattacccacttggtggcagaaactgctgggaaaattatgtagctaaatatagtgctattacagaattcttcagctgcttgttaaaaaacattcaggtgaacgttgccagtgtatattgtcagcatatattaaatcaactagctttaacaagtccagtaattaagctcttatgctccctgttaaattctcaactgcaataatgtcagtagacaagaacatctccttttgcctgaaaatgctcaggcgggctctgctcagcttgtgatgctgtccctgaaattactctccagctggtatcaactccgcagtgctgtggtcgtccgccttctccatgacggatgttcgttgagtggcggagtgactgctcagtgatggcctgctgggatctgagagactcaggtgcacactgccaactgcacatcttcccaggcaggtagcaagttcctctttcccatggaaggacacttttccaaagaaagccttgtggtcttgaggtggaaaagttttttgtgtttaattttactccttcccaccaaaagatactaactggaatatgtcattccagagccatcttctgtgtggccctgtcctccaggagcctttggctgtgacatttggaggaataaggtagacactaggcaggtcatcatgccaggtgccgtaggatttgctaggtttgcccagggggaagggcaggaaaggcagcatggggtagtggacgttgctgcacttggatgcttgctggacgaatgaaggaacccatactgacctgtgggaggagaggttacccacagggacatgatactgaatagagctatttaatgcatattcggaaggagtacctcctgcattcccccaaccctgtagatataggggaaaaataaaaagaggaagaggggagaggggatccagttcccacaaagaagatgcttatggagtatgagagcaggagggaccacccccagctctgcctctcagtaacatggtctgctgggcagagtcagcagaggaggcctgtggctgagtagggttgggccaagaattgggaacaagtagaagggatggcattccaggttggaaccaagtctggagcctgaatgagtgtggtcttacagagtgctgaggaccttgacctttttggagctaagggccagttttggagcaaaatgggaagtcgtgtgggattacagtggcgggggccaagtggaggcagttccccaggtgggtcgctccctcagcaagtcagagcctggtctggcccgcccacaggcttcacggcagggcatggggcagcttggctacttctggcaagttttcctgacttgttgcaggagcccaggggccctcctcctgcctttccacttctgggcactgcttccaggccttctctttggttctgggagctggtgtccaaagggcctgggctgtgagccttggggcttttcacgtgtcaccagtgcttcctggcctcccttaccttcattcagtaggctctgggaacaggatggcaggtctgtccctagcagggctgagagccgctgcctgcatctctgaaggctccttgggggccaggctaggagggcagacgccacttattttaggaactggagcctgagtctgcctcaacaaaagctccccggaggcgggatttctgcacagctgtcagctgtctgtgcatttagagctcagatcttctggatgaacccaggctgagtctgacctctgtgcactatcttgtgggtacaaagagcccctgagaagagtatttggggagatgaagagaacataagtatcttgtgtcaaatattctgggaatgttagccctgaagagttggcacgtgactctcaacatttaccgttccctgccaggaaggcgctccctgtaggttgttgcaacttgctctgagtcgggctggtttctctcagactctagcactgcaggacagctcatcacgtgagaacaccttcatattcatcatccatgtggagtgatactttccccatccttccataccaattctataggacacatatttagaagctgccatgacccgggccctgggctaagtcctgggcaccccatatgagagcccagcctcgggcctcctagagccagcgttgtatggagagcagttaggaggcggcagagcagtgccctgagcgcaagcacgaagcgagcgaatgtcaataccacctcatgctcagcagcagtgactggctctgtctgctgcccagccgcctccacgcacgccgaccccaacggacttttccgtgtgatggcctgcctgtgtcagccttgcaggagcactgtgcccacatccatgggctcctcgggacagggtgcgcatcagcttaattatcaccccaccgtgctcacatatggctcctagaaggttagtggcccacattagtttcactaaagtttctaaaaattaccattaattatttcttttcactgaactagtatctgctgaaccatgagcaaggattaaggcatcaactcctcagtctccaccccactgccagatagcccatctagaaaagcagattggatggctccctgccctgctgggaagcttcagttttctgcatcaccttcaaaatagaagcatactctttagcatggccaagacacgagcatgtgttgacagccagctggactccctggctcttcctgagaagctctgccctgggctccagccaagctgagccaccccaggctcccatccacaaagatctgtgaccctgcctggtgtggcttggaggattctttcctccatccagacttccatctccttcctagggagctgctctgggaaaggaagagccttccctgactgctccgggcgggcttgggcagtcttcctctgtgctctccagcatttcctaggctgtaacatggcattgctcatttcctacttccaggatggttgtaagaattacagagaacacccacaaagaggctaaaattgtgtgtggtactttttttctcttttggcaaaaactctttttcctaccccgatgttacacacaaaatgtagacatggtgtatattgcgtaatcttcgtttaaggttcttatgcttattttggggagagttgtgtttctgatggtatttggctgttctgggatttctgaacaggctgctgcagcctgctcttcagagcactgtatacctacctttttcaggaatgagttatattcatgtgaattccttctaagccagtgagaaaatagttttcctaagatcctgcccttctttggtgggtgaccctccccctgagctatagtggacatttccattgtggttcagatagactttgtcgtcctatggggcagatcagggccctcgacgtgtgggctgcctttgtcttggccatgtttggctgaccctgaatctcgtgactcttcagaattacgtgtttttaaatgggtggttttcacagtttagaatacacaacctaagcaatgcttggacgcttatgaaaacagacgtcaacattggacagactttgacgttgagattagagcagaaagcagcctttgctgcccaatctctacccagtaatggaggtttttctcatgatgtgatgggttttaaccaagctgtcctttgtcccccttggtcagtcagtcaggctcatgcctggcctgagcttggggctgggacacagaggtgagtgtgacagggacagtcccttgtcctcttggagctcacaggccagcagcagcacaagacagttccacaagtgactgccatttcccttggacagttttcagcactgctgccatccctgtccatggccactgtcccctagcttggcaggtgttgcttggctggtgttgccagggcctggtgccatgcacagcacatgggagggacttacatacttgaaggagtgggtggcggtgggtggtcaggtagatatgactgaaggtctcacaggagcctctcctgctgtgttccagcagctgcagaattggcctggttcccacaggcggcttcctgcttttagggcaaacagggcagggaccagccctggccagcaccaatcccttttacccatccacccaccaggagcactgcagggagccagccgggcagtttattttggctggctgctgcaggccgtcgaatctgtcatttttgttttcagctctttcatgccctttggtgtatgacatctacaacattgtcttcggcctgcgtgctcagccattcccgatactgggaaaaatcaaattccactttcagtggaggaaaagaaagcagaatttggggtgcaccgtcgcaggtcaggctcagccagcagtgatggcctgctgctgttctgtgatgggctgcccaggccagggacagcacttgctggtagttgggcactgggccagcggcaccaatgagcctgttgacacccagagtttattttgtctgaggtcacaggacacctgcatggcaaggccaagtctaaatgactcccgagcccgagtggtctctgagcgtcctctctacacttaccgtttctgcagccacacgcgggagcatcgcacacgcggagacaggaaaaggtggatgaatgaggtcacctttccttctgttgtgcagacagacctgtcttccccccgtgtgaatgccatcattctgaatgcagagaaagagttctttggtttttgcgttgagggaatttagcacttcggggttttgtgctgtcaagaagcttgtcttctgaagataaaattttttaaattttttttgtgcatttctgtagatgaagataaaattttattttcttatttgatctcagtgatgtcagaataactttttaaaactgtttaagagacacatttttcctttctattcagtaacaaatctcctttcattttagagccggtggggtccgtagtgctcattagactgtggtgggcttagctccatggagacatttgtggataaacgattgtttgagctgggcacagtgcaggggggcggagctggggtgcccaggcacagagatggggagaggagcccacattccactagtggggactggtagggtaacaggagtcataaagtaaaccaggattcgggtgcagggggctagggccagggtggaggtagactggagtgcagtatgggggggctgtggaagcaccaaactgggaagaggagggaacggaaggaggtggggaggcttcctggaagaattgatcctccagcttttcccagctggcgtttccccactagatcatcggctttggaccttaggggtcgagccagttttggatgtctctcacactccctgtcagtcagggggtgccttgggaattctgccaaaagcctcaggtcttcagcgagcttagggaccgggcaggtgatctcgccatggcagctcttccagcaaggtgatgcctgcatcagtgggggcgcctccctgaggagtgagggagagcaaaaacggcagccacataccaaattcctgccacttgctgggtgctcggctgaaggcaagtgagcagtgcatgtcttcccagagacccagggctccaggatgggagatggcacacagggcggcatatgctgtgcatgtgaacgccatgtagggtgtcgcggggccttctcgacatctgtgtaacacgcaccaagggagcagagcatggggagcctggccgacggccttgaggaagagttagttcaacacagctttgcgtaaacacatcctttctttctatgttgtctatcttatgtgttctgcctttggagttaggatctgaaaattgcaatttctgggtttctgtgtcatctattttttattttgtcattttgaacatttcagttaaagattcgtaactcagtgtgtctttatgattgttgaaatctgggattcatgcttttaaatgatcaaacggcaaggggtgctttcagggtagtgagctccattttcttcaccttcgtacttgaggatacaggtttcaggaacagaggatacggccagtcagtgttgggagcaagaactgaaaaccccaagttgagacagaattgaggccccgaggaaaggacaggactagtgctgggtcagaatcgagtctggattgtagatcagactcaaggcgattctgaatctctaaccctcttgggccctgcaaggtaaatagcatcacctcatttgcagatggcgagccccagtgaggttaggtgttagtctgagcttgtggttcaaggcagcaccgaagtgtggaactcccagggcctacattccagggctgagacaagttgggagcccagtggtggatgagctggtgggaagtttggggaccaggacgagtggaatcccatagaaatgaggatgtggaaattgcagtttggcacctgaaagcaaggcacggactagatggtttttcaaggacccctgttactctttggtgttttcaaacacacatcacagatttcacaaccctaatatcaacagtcatccccgtttggaaaggaagattcagcataggggttaggataggttggaagaaagttgcctgaagctgtcaccatggggacatctggcaggtgtgtacaggatacaacatctgccaggcacacgcacaccctccccagggaaggtgggtgagaggtagtgactctgcagggcacagtcctgaggagaagggactcagtcctggagccccctctagctgcctgggacgtgggttggcttagggataaactaactcaggccctggatttccctgaaagctttgtagctgcagtgaaggcccggtgaggccctgcagctggctgtgcttatgtgactctctcaggaatgcggcagaagcgccgggagttgctcttctgccggccatgaagttactggctgatgacgtgctaagagttgattccttttagctaccatggagagagctcgtgtgactcgcaggattgagaactgataaataggccgggcgcggtggctcacacctgtattcccaacactttgggaggctgaggtgggtggatcacttgaggtcaggagttcaagaccagcctggccaacatggcgaagccctgtctctactaaaaatacaaaaattagccaggcgtggtggtgcatgtctgtaatcccagctacttgggaggctgaggcaggagaatcgcttgaacccaggaggcagaggttgtggtgagccgagatcatgccactgctgagatgcaccactgtccagcctggaagacagagcgagactccatctcaaaaaaaaaagaactgacagataaaggatcatgagttgtttggttgaccatgcctctgagatctcagcgacttctcagtcccttcctttccagggggaatggaaatcccagctcccagcactgtttgggctctgagaagatagggtgtcctctttctgcctggcatggatgatggagacatatagaggcatagtagttgccctcagaacccactattttgatgcattttggcatgtgacagcacatgtccaccagggggaggggtaatctgtgggggaagcgtcctggggcagcagagcccccagctcactctccgtgggcctcatggcattttcctcagctgtgagaaagcggccttgcctcagagctgtcttcagctaccgcctcaaacatcgcttcctccaggcagccctgaccacccagagtgttccttctcacaatgtgtcactgtctcattgcattatttttctggccataagttccatgagggacagtcgcatggcagtttgttcaccactatatccctagggcctcgtggcccttcacacacagtggatgttccttaaatacctctcagtggcaagagagtgttgccagacgctcagaaatggagtgatgaatgcttcagtggggagccagccagctggtggcatcagcagactggaaactgctccctctgcaccacggagaggaagggccaggggcgagccagctggtccgagctgaaccacggaaggaagacgccctggtggtgcccctgcaggcaaagcccatggaaccagagtcgaatgtctgacccagagctggtcaggtatgccaggaagcaccaacatcgtcttcaaccagacaccctggaatcctgaaggctcacctcaccccccaccctgacccccagacagggtgaagaaatggcttagcaagaagttaggccttgtcaggcgatcgccgtggcaggcggagagcacagctggctgggaagaaacctaccgtgcagtgtaaacccctcctatcctgggccatttggtcctcacaggaatagctctgactctacctgacaactgaaagggcagaaatatacggagagggacttgtacaaagttacacattttggggcagggccagatctgtgctgctcccctcatgagagcaggtgaagggaaggaggtcttgttagggctgggaaatccgatggatttgaacaagttatcgaaagcattttgcccgtctcgttgccaactgcagacttggaattaaggaatccctaaagagttgcctcatccttgtctgccaggctgacagaggagatgctagagcttcttggcatatttggtcagctttggataaaacatttgactctggttccatgggcttgcctggcgaggggtacgccaggagctcttctgtaggtcagcttgggatagctggctcacccttgacccttcctctccagggtgcagagggagcggttgtggtgcttgggccttcagggccacagattaaaggggaagatcatcctgaggttaaaatcagggtcatccttggcaaccggtcctagaagtttacaggcttggggttcctgggaactttgttggcatatggtggggacaggagcagggcctgtgtgctgcatggagtctggaattctgtttgtgacttgctggcgcccacagggctggctggaagcacacgcatcatctcatgttgacttggtaagtctcagtttacaccagctctgatcccggcctgagggatgtttgggcaggtggcctctctttctgttgcatgaccatgagtgactgcatctcttcaaacttcagtttccttttctctaaaatagggacactaggtcgggtgcggtggctcatgcctgtaatcccagcactttgggagtccaagttgggaggattgcttgagcctaggagtttgaaatcagccctggcaacatagtaagaacctgtctctacaaaaaatataaaaaattagccaggtgtagtggtacatacctgtggtcccagctactcggaggctgaggcaggaggatcacttcggacgggaaggttgcgcctctgtgattgtgccactgcactccagcctgggcaatacagtgagacccttctcgcaaataaaataataaaatttaatttaatttttaaaaatagacattaatagtatcccctggctagcattctcacaagattaagtggggtggcatgtaaaactgtcagtaccctgcctggccaagtatgggatgctctattatgacgccgtcgctagtgaaaatcactcagtgtgtggcaccttttggcgggaggcttacagtctagctagggaagtgaggctaatgtgctcgaggcaattttgagacgagctgtgacccgaagggcatggggacggtgttcacaagggccatcatggcccccagctggaccagatggcaggagtcctcagatgagtctcccctgtctgtgggtgcaggtggtgtagactgggttggtgctccacgctggtgctccagcaaggacgggctgcatcagggaagcctgcgtggggaaaaggagccaagacttcacagagagctgagatgggggcaggtaggagggggactcgctcatcaataaccgttcctgtctctatttctccacctgcagttgatacctaggccccctccccatttctaatgttacagcttttgttagcatctgctctcataaacttcgcacccctacttcatgtgcacgtattcttaattgatgtaaatggcatcatgccccacatcattctgtttctgttctgggtcagtgtgtcggcgtagtcgcgcacatccttcctcccgctgcactgctgggccccgtgcttacctgtgcattccccagggagaggccccctacctgtcctgggaccaaagggaacacttctatgggaatctaagcccagaatgaagctgctgggtcatcgtagggcacttgcatgctttatgatttaatgactgcctagttgtgcacagaggcctgcccagtctgtttccaccagtatatccagtaaagggtgctgtacacccacctctgcccacacttggcctttcccactctctggtggttgccagtccacaggcgtagagctgccttgctgttctcaggcacatccctctgggcacccacatacagaggtgtctctgtgtgctctgcctgctgtcatcccagctactcgggaggccgaggcaggaaaatcgcttaaacccgggaggcagaggttgcaagtgagccgagatggcaccactgcgcttcagcttgggcaacagagctagactccgtctcaaaaaaaaagaaaaagaaaaattttgtttaaggagccatgccgtaagtcacaaaggtattcgcgttcattttcttctggtcatgttatggttttacctcacatttgtatggggtgcctgctgtgcggtagaccctgtggaaagcaatggagaaagagtggtggattaggaagacacaggtccacaccctcttagggcccagagtctgaaggtattaggggttgggagcaccacagagcttggcatggtcctgtgtctgcacagcagaccttctccagcgtccttgtgaaaggcacctctggactgtttacaacagatgcatgcaggatggaggaggagctgacgtggcctctttggatagtccccccagcacgcctgtgacaataagctgctgggtttcaggtagagcccctttctctgctcctgattgcacggatgtttctgcacagggatggttgagattccagctgccacctcatcctagctgactttaaaactgaggcttggctgacattgggttctcagaggaacgattagaagcctggctcactgagagggagtgagtgcagcctggaggagggcaggcggcagggcgagtcctgggctcggggaagggcatggggaagggagtggattccctggaggcagagcttgattgtgagggatgtggcccccaaggtccatccctgggaggcaggagagcggcctccggaggaccctagaaaggaggttctcagccgggcacagtggctcacgcctgtaatcccagcactttgggaggctgaggtgggcagatcacctgagttcgggagtttgagaccagcctgaccaacatgcagaaaacccgtctctactaaaaatacaaaattagctgggcgtggtggcgcatgtctgtaatcccagctactcgtgaggctgaggcaagagaatcgcttgaaccaaggaggcagaggttgtggtgagccgagatcgcaccattgcactccagcctggacaacaagagcgaaactgtctcaaaaaaaaaaaaagaaaaggaaggaggttctctttcccaaggtgggcacagcctggagaaggcaggggtgctgtatgcagagaaacctgtctgggagccagggattcccacgacctttgtccccgcatcctccacctggaggatgggcagctcccttttttggctcgcatgccctgggttccactgagcagccccattctctggaggctgctctcaattcttccttccaggatgtccccacccccgccagccttctgagccccaccagtccccaagcctgacacccttcaggatgcaggcctagccttcccagtttctcagcatctgccctccctcattgccatttgctccctgtgttctgtgttccattcccagctgacttctctcagggccccagggttgccatgtggacacaccttccttttgccagtgctgttccctgtgcctggaattattttcctggcctcacctttaatctggccagcctcctacctgtccttgaagatgccctttggatattgcgttcaggatacctctcaccccctcctcctagtgccccagttccagtgccctgtgcccaagcactgagtccctcagtaggtacatgcttggccctccgtctgccaggcagtccctcaggggagtgaagggatgtccaggcacatgtatgctgagcatttgtctttggtagcttagtttctgagtggagtgagcctgaatttagaggaagttaggaacatagcttcatacctggttcaaaaatgaggattttgtgaatgaagcaattaatatgtttggaagaaagcatgcttatattcagtttctacctaaagttttctgccatttggctatcccaaaacaacctaatgttttgaagaagtagaagagaggtttttaattacaaaactgatagagcagaaatagttaactatatatgtgctgattttaatgtatgatcgatttgtcaaatatttgaaaattaattttcttgcattgtaaaaactagtcattattatacgtttgattttttaaaaaatatattaaaaagggaacaggccaggcgctgtggcttatacatgtaatcccaacactttgggaggccaaggtgggaggatcgcttgagcccaggaattcaagaccagcctaggcaacacggcaaaaccctgtctctgcaaaaaatacaaaaattagccaggtgtggtggtgcgtacctgtagttccagctactctggaggctgaggtgggaggatcacttgagcctgggaggttaaggccacagtgagccatgattgtggcactgcactctagcctgggcaacaaagcaagaccctgtctcaaaaagaaaaaaaaggaacaaactttactcaagaaggcatacagatggcaaatagtcataagaaaagattttcagtattattagactttagaaagatgcaaattaaaatcacaatgcaatattgctacactaagtagaatggctaaaaataacaaaacagaacaaaacaccctggcaatactaagtgctgggagcatgcaggacagggaagtctcatacgttgctgatggcagtgcacagctgtccagtcactttgggtagcagttcggcagttttgttaaacgtacagttaacatttccattcctaggtattcaccgaagagtcatggaagcttatgtccccacaaaagaccaatagatgaacgttatagcttctttattcataattcccccaaactgaaaatgacccaagcaaccttcagcaggaagaatatggataaaccaaagagtggtataactacccaatcgaatactacttagcagtaagaaagagtgaacttctgatagtggtatacctacacagtcgaatactacttagcagtaagaaagagtgaacttctgatagtggcataactacacaatcgaatactacttagcagtaagaaagagtgaccttctgacgtagatagcaacatggatcagtctcagaaacattatggtgggtgacagaagccagtctcaaaagccaggctgcatactgtgtattccatatatccttgccatcctggaaaaggggcaaaaatcatgtctgtggttgctgggggctgtatggggaggggatgggctgcaagggggcacaaaggcacttcatgagagatggaagtgtcctgttccttgctgtggaggtggtagacagtggtatatgtttgtccacattcagatctaagtgtaccctgtagtgggcagttttgcctgtgtgtagattccatctcgacctagagaagcagccagcagtagctctgctcctgggacgactgcagtgctttgcccagggaagtggaaaggccacattgctctgtccctggtggtttatggcgatagagacttccagtgatggccttcaccggccaccacacaaccgtttcattaaagggacagcagggccgatgttgctggggtgcctcggtcccaactgtttggcatactgcccttctcccgttggctctgtgctcagccaacttgcctcttgtccccagcagtggtcacaggaccagcacaggctcctctgcagcctctaggaccaactgggagcttatttggaaacctgaaatgtgtacttacggaaacactcttcctgtattcatcacggatttccacatttcaagagttgtcatgtaaatgtgtatttgcagctcctgtgtgtgccgatgggtggtaccaacatgtgacttgttaagaaatatccttttcttttccctaaacctttaaccagtggttctgaaaatcacagagataagcaggtttcaagagagccaaaatacatgatttgatggtgattaccaatttgaatactgttggtaataggcagatgaaaaccagctctgggttgtggcttcatgtcgactgtcaaggctaagttagggccgtgttacctcagctcctcctaccaccagctcaacgatactgagttgcttgttgggtatttttttcatcctgctgtaaatttcaaaatgacagtaaggcctcattttaagggaagcaaccacataatgtcacttccagtgagctgtgaaaatgctcacttccgacttcctcacaggagctgctctagtttggagtggatgctcaggttcagctcatgttttgacgagctgccgagctgccagccttgctgggggaggtctttggagggaatgagtagagccggaagtctcatctgcctctggagaaggctgcccaggctaaccaccttccaggggtctttgcttttcaccaggattctggttctcacaggagtggagtcatctcagcccatgtagctcagcctcagggacagcccttcctccaggtgctgcagcccccttccctccccttgcccatctctgtgcagggccaggcaaagagattttagaaaaggtaaaactgacaaggggttgactaagatttttgaaggcattgggagaaaaaggctgaaaagagatcgtttttctgtcatatttcctctgggtgctcaagttatcagcgactgtagcctttcaagccagcagctaaaagaatgaaacatatcgaacattttcgttttcaccccaaattagccattaacatttcctcagttactcttttattacttataactttgatgaactagtttttcttttcatatacgaaaaaaggcagtcaaaactcagcttagccctgacaaagctttgccatcaagacagtcctacttggaaccctttgaaaaactgcctttgggctgggcgcggtgcctcacgcctgtaatcccagcactttgggaggctgatgtgggtggatcacaaggtcaggagattgagaccatcctggccaacatggtgaaaccctgtctccactaaaaatacaaaaactagctgggtgtgatggcatgcgtgcctgtagtcccagctactgaggaggctgaggcagaagaatcacttgaacctgggatgcggaggttgcagtgagccgagatcgtgccactgcactccagcctgacgacagcgagactgtgtctcaaaaaaaaaaacaattgccttcagctccagcctagccactgtggctgcaggatcttgacaaaccacgtaacttctctaagcctttgtttcctcatctgtaaaatggggacacttattcctactaggtaggggagacagtatttggaggtgtaaaacacctagcaggtcgcctggcacatggtaggtgctcaggaagtggaaaagtttttacagctatgattgggaagtaataacccagcacatgatggatgacatcaaagcagaaggctttggttagatgtcacctactccaggaagccagccccagcccctcagtctgcgtgaggtgcccgtttaggcatcctcagccccaccccttcctgagccagtcagcctcccttcctgacccacagcccagtttctacttggtacccaacctaaagaacattgagaagcccccgttcactgatgtgtatgatcttattaataataaaaatagagaggctcattatctaactacacggagtgcctttcaaactcttggagaggggtgtggtaaacatgaccccaggggcgcatcagggcctggttggcatggaggccatttgtgccacagccaaggacaggctgccccaagccccctgcctcccagctggttctctctcctaggtcgggaactacaagcggactgtgaagcggatcgacgatggccaccgcctgtgcagcgacctcatgaactgcctgcatgagcgggcgcgcatcgagaaggcgtatgcgcagcagctcactgagtgggcccggcgctggaggcagctcgtggagaaaggtatggggccccggcacaggtcctgtggcctggaggcagctacaccccagccgggggctctgggcacgttgtgaccctctctatgccagttttctgtcttttaagattggggcaagagtgcatttcccagttccagagcggggtgtgatttttatggggagcattagcgcccatcaccagaaggcacaggctccatgagcttttgtccactttccttggggacacaggactatagcccttgtcatccataggacacacttgcacttgccgagttaactcagaactcgggtaagttcctatcacgtggaaggccttgccgcttggcaccttagtttctaacactgagagctgtttatttttaaacttggccatgtagcaggtcagataagactagctggcaacacctggcagtctttctgagtttacattttaagggaataattacaggtgttgtatggcagaggtttcacccccttctgtccccaccgaaaagctcagaagattctgtagctttattagtgccactgttgtgtggacaggggccatgcttagaacacacttcccagcagggaaggggaacttgactgattacagcctttccggcacagaagcagagcagtgtgggtttctcaaggtgtgttttggggcaggctttcctgtgctgaccagctgtcctcagccccagctgtcctcagccaatcaggggagccaggtcccaagcaagccaggtctagtccagctgcctgtcctttcccgtgatgctgacatgggttgtttgtgtgggcttagcacagtccttagggcagggtatgtgcccaggctgtggagcaggcacgtggcagaggaggggcctaggataggtcagctcccttggtcggtggcagtgtcgtcatttcgtttccacctgctgcagcccctctcccaggatcaagctgtcagtcagagcttgaggtttacagagcacccttaccaccctcaccttgtgggtctggctgtaacgttgtggacaggacaggaatgtgctcattttgtagacacgaaggcacagagaggtccaacttccggggctgttctctgttgtctccaagccccagagtcacgtgtccccctctgggttctcacagcctgccctcccctcagcccacctctgtcatgactcagcgcacttggtcactgtccctgtgaccaccttgaagaccagccatggatcttctcgatttctgccccggctccgttgtggctctccctccctccagcctcacgccaccccaccctaccccctgaatagaaatgccagcctggattagggcttccttcctgagcctcggggactgagaacagtgagtagggagaggcgactcagcccctcctgccatactggtccagagcaggctcctgcttcctcctctccttcctcctgcaggatgggcttccattctgctgaggggacagtcctcattccacagtgttctcaagcttgtgctcagagccaggctctttctgggagtgaatgaacacagtcctgcagaggaaggcagtgcagggctagccaggggccaagcagggctgataggagccatgccaggagaagcgttggcatggtgtgggtgggtgcccaacacctgggagaagcatctgctcacttcagaaggtccccccttctctggccacctttaagtaaattaagacttctaagatgtggaaatttgagtttttatagagttcagtggctttaaataaaggaaaggcatggccgggcgcggtggctcacgcctgtaatccctgcactttgggaggccgaggcgaatggatcacctgaggtcaggagttcgagatcagccagcctggccaacatggtgaaaccccgtctctactaaaaatacaaaaatttagccaggcgtggtggcgggcacctgtaatcccagctactcgggaggctgaggcaggagaatctcttgaacctgggagacagagtttgcagtgagccaagatcacgtctctgcactccagccgggacaataagagcgaaactccatcccaaaaataaaaataaaggaaaggcatgtaatcccccaattttcctaacacgaggggcagagcaaattcagctttgggaactgaaaaaggcacagagtccctgagagaaaaatatctgaaaccctgaaaggaaaccctctgtggtctaaatggccacattgaacagccgaggtgtgagcagagcagaccccaccatggccggcgctgagtgacccgcagcttctctcccctgcacagggccccagtacgggaccgtggagaaggcctggatggccttcatgtccgaggcagagagggtgagcgagctgcacctcgaggtgaaggcctcactgatgaacgatgacttcgagaagatcaagaactggcagaaggaagcctttcacaagcagatgatgggcggcttcaaggagaccaaggaagctgaggacggctttcggaaggcacagaagccctgggccaagaagctgaaagaggtacatctgtcctgcaggcttccctgcccggccttgctctgcctggcaccccactagcagcaccacctcctgcacctaggacttcctgccactggctgtaggcacaggaggccagacctggtagagatgaagccactcctcaggctagaagcccatggtagttgacatttacccaggttgaagatgctgaatgctctatgtgcattctttaaattttttatttttattttttgagacaaagtctcactctctctcccaggctggagtgcagtggtgcaatctcagctcactgcaacctgtgcctcctgggttcaagcaattctgcctcagccctccgagtagctgggactaccggcacatgccaccacaccctgctaatttttgtatttttagtagagacggggtttcaccatgttggccaggctggtctcgaactcttgacctcaggtgatccacccaccttggcctcccaaagtgctggaattacagggcattctttaaatttgatcctaccaacacattttacagatttggtaactgaggatcagaaccatacattggtggtagagctcaaagcccaagctcttaaccactaacagtacttctcccaaccctggggaagtgtctgctggagacttaaaagtccttgccgggcgcggtggctcacgcctgtaatcccagcactttgggaggctgaggcaggcggatcacgaggtcaggagattgagaccatcctggccaacatgatgaaaccccatctctactaaaagtacaaaaattagcagggcgtggtggcgggcacctgtagttccagctactcaggaggctgagggaggagaatcacttgaacccaggaggtggaagttgcagtgagctgagatcacgccactgcactccagcctggtgacagagggagactctgtctcaaaaaaaaaaaaaaaagtccctttggctgctctgcgtgtgcagtagcctttctttattcctttactttctcaataaacttgctttcactttatttttttttcaagtccctttgacgatagaaagaactagtttacatttttctttctcttgcataggtttttatcccaaaatttcaaacattgatacctgtttttctaaaagtagcaaccaaagccattgagttttgtcgagccttggctagttggaggctgtcatctgtccaccccagccctcagcttgtgtgccccgcccctgcctgcagcctcgccccccattcctagctggaatggagtagacggtagatgtgccacccccaacacccagatgttctctggccttgcgctgccttcctccgcctcagaatcatccagaacatgcctctgtccttccggatggttttctctgtgtctccttttctctgtgtcttagcttttgtcacatctcctttctcttctgttttgtccctggccccattcataatgaaactgtctgtgtctcatgaggcctttgctaataaactcctccttccctctagaatgaaatttgtggctttggctcaaataaggaaggatctgttaagagtgtgtgtgtgtgtgtgtgtgtgtgtaaaaaccattaaaaccagaggaaatgtggctgatggccctgccccctagtatggtcctctctctcatgctgggttcctccttggaactttctttgtatttgccgatcctgcggcctggcatggtcttcctgggatgcccataacccctccatgtgcgtgttccatgtgcgtgctccatgtgcgtgttccatgtcatctcagtggctttctccacccaccccatgctccgtctcagttgtcctcccctacacttaatgccctctaattgactctggcatgtaacttttcctatactgtatctgcctcctgcaactcaaatgaaagcttcacaaagaccttgtgtttcttgctgtgttcctggtgcctcgaaccatgcacaggacaagcaagtactccatgaatatgtgttgagtgcgttcctgttgtgactggttgctatgatagtatacatacaattttgtacctgcctttttctcccctcttggtagcacaagcattcccatggtctgtgtgacttctagtgaggatcctgaactcccagtgacatggcattcaggaactcattctccctgtaggtagaagcagcaaagaaagcccaccatgcagcgtgcaaagaggagaagctggctatctcacgagaagccaacagcaaggcagacccatccctcaaccctgaacagctcaagaaattgcaagacaaaatagaaaagtgcaagcaagatgttcttaaggtaaactgtacacttgtttttacacgtcgagtgtcaccgtgtcagttgttgacgtgtctggcatatagccttctgtaactgcttgggtgaatgggtggatagagggataaataaccaataaaacacacccctgtcctcaagaaggccacaggtgagtgccctagcacctcgcctcaccatagccactgtacctgctcagtcaagggacagagccaggctctgggcaagccaggggtaagagacagctcttggtgctcagagacacaaggacagctgggattgctgcagggagctgcttgtgccaacatgggcgtcgccagtggtgggtgtgaatgggtgtggctggtggcaggtgtgaatggttgtggccagtggtgggtgtgaatgggtgtggtgtgagctggtatggagggttatgaggaccaaatcaccagtggcctggacagccaggctgagtaaggagcttaggatgctgctgaccaggagccactcaggaaggcctgagcctgggtgggatcagggaggaggtgaggagggtgagatggtttagaaggattgctctgcttgtgtagggagaggggctgggggcagagacctgggggagggactgcaggctgggagcgcttgtctgggggagccaggtgggagggaggatggaggggccctgcagtctccacagtgacaggccccgaaagtgaggcagaggctgtggagccaggggtggcagaagggtggtctttggccaaggagagaccgtgaccaggcactgtggcatcatgggtgcccttccatttctgttgtgaagcggagattttctgccccatgggttaatgagaaatcattgtgtaaactattacatgctccgcaggtgtagataagtgattctgcctggaaggtcctggagtcacaggacttaaaaccagacagcgtcatcgtcttgtgatttaaaagttcacaggaagggaggggctcagccctcggccccacctcccctcctttggtcagccatgaggggtgagggctggggggtgtgattgccgagggcctgccctgcctcggtgtttggagaggagattcccaaccaggatttgcagagagagacggaatgaggtagagagaggctgcactccaggaagaggacatgggcagaggggaggcaagaggcctaagctggtttcactacccaccagcctttcctggcccctgtcagttaggtggtggcatccctgttttgtgaatgaggaaaccaagatcagagaggttaagtcacgtgccatccagcaggtgagagcaggaacttctgacctcaagcccatacatatgccctttctccactgttcctcactgctatgccgtcggtgtagcaaggggaacacgtcatctacacgagagttcgtcactcagaccaagtgtcagaatcctctgggaaacccctctcactcccattgctggagccaggaatctgggcttttgaagcagcccaggtgcctccacggtgggatcaggtgaggagcctggaaccaactactgagtgggaggcacctgggctcaagaagcacaaggtccgggagaactctcgggcctttgccagaatcccagggaatcaggtgcccaaaaaggtgcctagaggaaagatggggcttctccatgttgggcgggggcgtgcctgtgtgagagaaagggagacagagatggagaggaagaggcctttcatgtttgacagccacccagaacatcaactcaggcttttgcagaacaggcccagggctcgaggttggacataagcgcctggcaggatgactgggacagtttgtagtgggttccctcctgggaccctccctgcctctttggtctggccagtgactgcaggatatgagaggtccttgtgtgcctagagctctggagaggaggccagtccctccccaccacccttcttgacgcagtttccaaaatccagcacacagcctgggaaacatagtgagacctcatctctacaaaaaatttaaaaacttagttgggtgtggtagcacgtgcctgtagtcccagctactttggaggctgaggcgggaggattgcttgagcccaggagttcaaggctgctgcaagctgtggtcacaccactgcactccagcctgggtgacagagtgagacctcatctctaaagtaggtaagtaggtaggtacatacatacctacctacctacctacctacctacctacctacctacatacataccattgctgactggttgcacatgtactttcatgtttcttatcagccatcaactacatcttgtagcatccatcataaaagaactttttgcatttagtgctaaaatattacaatccacctaagggtgaaggccgcctcttgttttactccatgggtgttcgctgagaactttctatgccctgcaaggggatttccagaacagtgatgaccctgctgagtacctggcctgtgctgggggcaggacttggggctagcagggtcggcacaggctgagggcaggggcagcccagaggtggagcatcttgttgccactgagtaccctgagagctcccgggaggctattgtgtcttgaaggctcctgagatggggctgctctgtgtcacttcagcagtatcctccagatgctgggcgctgaacccacagctatgtgtcttgggcttctgagctaggctcccatgcagggctgccaggtagtgggcacgggcagtgtggatggctgtggggaataggggaatagccacagcgctgtggagctctttctctgctgggcatgccccagccctggcaggggtggccttttcctggcacagaggacccaagcccagccatcttaggaggctgagaagcagagcaaggacccggataccaggagaggagaaaggggcaggagtcagggccctagagggcggggtggaacctggtctcacgaggctggggaaggcttcaagaagaggagttgctttggagcctgaagcagagtctcccagggctctgagccacgtgagtcagaggagagcatctgggaggggagccgcatgggcagggtagactcagtcccagctgggggcagagagggtgcccgataggcctgcagtgtctcgggaagcgctccatccttcctcagaaggccctgcacatgttgttagggacagcaaagcttagacctgagtggagcccgtgactacccccatagtagaaagaattgcaataaataggtggccccagccctgctatctctcacccaccccagggggacaacacgaccatgatcccaccaactaacaaaaccacctggccaccaaactggtggccctgcatgctgagatgagggggtgcggggaagtgtgtaccagtgtgaggtcattgacctcgaggcacatccccaccagatgaatgtgcccactttagccatgtcttaggaatttcacacgttttctagctgcccctggatattcttgagataggccacacctgctttttaacatttcctgccttgtaaaaccccttcttgggacaatctgggagggagcagctgtgtgagggggatggagtgggctgaaagacaagagaaggaggactttttttgaatgccttcttcctgcaccccatcatgtacatatcagaacactgtgaaggagagatgtcctcatctgataaaggacagtgaggctccaagagagctgcaggattcagccccagccccacctttgctgtgggccagatctgaggcttgagggtagccaggcacagcccttccccacagggagaagaggacatgggcgtgtggcacgctcaagaccatacacactgagttctggggagactgccctttgccggcatctacctgtctgggccttgctccagctgagagacagggcagatggcaggagtgtgattcaccttgcaggagtggaggaactgggacttgaacttgaagtctgtcagaatccagagctcctgttttttctttgcatttggaatctgggaaggcctgagacactccaggggcagggtgagccaagggctaaatggaaatgaacctctgtcttgtgcctggattttcctttagaccaaagagaagtatgagaagtccctgaaggaactcgaccagggcacaccccagtacatggagaacatggagcaggtgtttgagcagtgccagcagttcgaggagaaacgccttcgcttcttccgggaggttctgctggaggttcagaagcacctagacctgtccaatgtggctgggtaagtttcctttgagctaaaacacacacgtcattgaagtcaacggaaagtgcttttgaagcaaactcagatgctgctcccaggtttgggatggcgcgttcatcaggaggtctcctcaccgccctcagggcctcctgcttctttgtaatctggatggcagggagggcccctctgctgagtgtttctgcagctgcaggcatggccggctggacctctggaaggcctggttgacccggccaattgctggcccaagcagataaggccgggcccactctgccaactccatgtacaggtctgggtgggaatggagattgcccattctggggccacagctaggaccaaggcagctggcatatcttttcttttctttttttttttttgagacggagtcttgctttgtccccaggctggagtgcagtggcgtgatctcagttcactgcaacctcctccaccttctggtttcaagcagttctcctgcctcagcctcccgagtagctgggattacaggcatgcgccaccacacccagctaatttctgtatttttagtagagatggggtttcaccatgttgtccaggatggtctcgatctcttgaccttgtgatccgcccacctcggccttccaaagtgctgggattacaggcgtgagccaccgcacctggccgcagctggcatatgtaagatccactggaggtgaatctggcatttctgggctggtcgtgcctgggacagtctttctttgaggccctttgtgatcaggtgactgcttagtggctctcagcccccaggacagcacataccctctgagacttggttctgaattgtgatatggaagctgtgctgtttcttctgtgctttcctcatctttggttctgtgatgccttcaccagggcagaggtcccagctaagtcaaggacgtggattactgtcatccatctagcagaaccgtgtagggatgcgtcacgggtcaaggcttgctgttaataggagacacattccgtttgtctccctctgtgtaacaatcatcaaaagcaacagttactgcaccgctgctgctctgccaccattccatttttatgatagtcttgtaaagtgggtggcactgaccccatcttattgatgaggaagctgaggctgggtgagattaaatgacttgcccgaggctgctctgctggcaggagcagggtgaggctggcctgtgtcaggctcttctgcatgtggagtgactcccatcgtgtggatgcttgtctgtctctgtgtctggatttcccccttttaatacaggcaccagtcatatggattagggcccctgctagtgacctcattttagcttgattacctctataaagaccttatttccaaataaggccacattccgaggcactggggtttggactccagcatgtctcctatgaaggacacaattcaacccttgatggaggggatcatgcccactcaacggaggaggaaaccgaggcccagagaaagtacatgactcaccagccataaagattataagtgaaaatatcaggtccagcagtgatccatactcttccctggcagggcagcttcctaggaaggtgagccgatgatggctgccaggcggaaggcagcccccaccccgtcttggtggtgggtgtgttcagcaccgggtcatcttcacgctctgcattggcaagtctgggtataaagcttttctggacagagatgaggaaggaggggtactttctaacaccctccagttttctcttcctcaactctgggcctggtgaaatgggaccacacagagtggtggcccacacagcccacctgctggtgccttttgcatatgtgacacagagcagggcttagtcattgccacctgcttggctggtttgatttaaagctcatttgtcaggagccatctgtgcacgtggcggcccgtgaccttccacctgagccaagggaggagtgttctggctctgtctgtgaaaccaactcacagagggcagagaccacgggacctgctgtggctggcactgggctgggacaaagggtagctggcccctgccttctaaaagagccacgtttctctctgatttagctacaaagccatttaccatgacctggagcagagcatcagagcagctgatgcagtggaggacctgaggtggttccgagccaatcacgggccgggcatggccatgaactggccgcagtttgaggtaagaggagggtgtgcccatgagctcatcagcctggaagaggacctgggcccacagagttgctagatgatgtctttctcattctagactctatgttagtgtttgccctgtttatcaggcagcctttaggcatagctatagtacagaccaagttctggcatagagtcctggggggctgcaggcattaccgaaggccttctgaacctctcctgaagtcgcggttatgtcctctctagttgggaatgtttgactgtcactttttggccactggcattcccttccttcctagtcagtctcaggagccgtaggcacacaggacctcaggtccctgacccaccctgtgggatggccaggaagggagcagccacagtgctcccctcacggtgggccaggggaggggaggtggtctcagtgggcagccctccctacccttccaacaaaggacttttccctactccaggcagtaaattcagtgaatcctgattcaaaatgaatgttcttcttttcccatcatgtgggtctaagctttcattatctttacattcgaaatgcaagggcctggggatctcaggactcacctagcccttggattggtcactaggccccacctggcaccctgaaggcagtgggcaaaggtcctggtgcccctgaggcttaagcacgtggcgtcagctgccccagcagggatgctgagggcgactacctctgctgtgggcgtgggcctcgtggcttccccgactcagcagcggccagagcccgggctgcattcagattctgctcacctctgaccacctgtgggaagctgagcaaactattcgccctttttgtgactcagttttcccacgtgtggaatgggaatgacaagagcacccatctcctgtcgggggctgttagggaacatggtgactttgtccacgcagggctattgacccaggcccaccactcagaaacctcctgggcgcctcatagcctgcagttttgtcagtccttactcctgcacttcttttatggcccttaacaggaaggtttttccaaatgacagtgtgggccctgctgccgagcactcccctgcgccagccccaggacttgctcccagtaggaggcagtagagcagctgtgccccttccacagaggcactgagagagcatggagggccagagccgtcctgactggaagcggccctagaggggacagcacaaagcccagcctctcctctggagccacacaccaggaagtcttggctgacgtgttttgtgcacagctggggtttcagacacagcgaggatttgctgctcccggagtggcacaggaaaccacctgtgaaattcgcctgggtcccttagaggtgcccattatacccaaagaggggcacagtggggaggactatttgacagtctgtctcctggagggtgtcccagccagagcctagggggtccttctctctgtgggtccatgggctgggaaccagcccctgtgcattcattctgcgcacatttgcagctgttacgggaccatgcctttctctaatgcaattctttgtttttatttttcatgccacaaggatgaagtaagtgtctgcgttcggctacctcatagagtgccatacgccatgcagggtgtctgtggcccgcatgggtgggtgtgctgcccccgctaggctcctagcagttcagctgaggctgcgctgctgtcaggggtattgagagccggcccttcccatcagtgccggcttggtgttgatcccattggcctttggaagccacccaatcaggatgaatttatattcagaggtcactgtggagaactctgaggttccaattgagttctcagtcaatctattttggtcagaaaataattaatagatgaaaaggtgacccagatttggggtcgggcccaagtctgccacccacactgcgtgggcaaatcacattgcctttctgggcctcagtttcctaatctgacaaatggacaggttagacaggatgcttctgagttggcttccaacccaaaagttctgtaagtacgtgtgagcagagccgtggactcagccacaccaagttttaatcagagttgtctggtaactggtggagatggggggaaggagagctcattaaacacctgcgggcatgcacagactcttctagaaaatcaagacacagtctccattcatggttttgccctagtccattttcagtgcggttggtgaagccagttcgccacccgagaactcgtgaggcttccaggaggagcgtactctgctttgcttcgttagccccagcatgtgctcagatcacagaggaaaagtcccagggcagcaaaacactggggagggccctgcgctttggagactgagagtctgcttgcctgccccttctgtcagcgggtagccacctagccctggttttatttgcagtggctttatttgcacctggttttatttgcacctgcctttccacatggcaggcttgctcaggtctccgaagccaactgtcttgaccctgtggcccagggacaatttagggcatcgacgcaaaggatcttcagcacttcaggacaggtgcctcagaggctggctcctgtctactttgggaggctcagcagacatctggggaggccacaggggcccatgctggcctgagggggctgggactgagaaccttggtgggtggggtcaggaacaggaggccccggaccttgccctggtcctcgccacccccgctggtcctctgggaggtgggcagcatggcctgggggtggttgtagaggtgcaagcctccagatcccctgatgagcccctgctttgaacagtgaggaggggctcaggtcgtttgggttcataagtggggcatggggagcctgaggtcttctgggaaaccagggagagctggggccctgagtctacacatcagatgcacagagccaactgcaggctcgctgggcaggaactgaggacagacgtggcttccagcaagtagtgaacctttggtttctctccctcggcacctgttgcctaggagtggtccgcagacctgaatcgaaccctcagccggagagagaagaagaaggccactgacggcgtcaccctgacgggcatcaaccagacaggcgaccagtctctgccgagtaagcccagcaggtgagtgggcgccacctccatccaaaagaggccgttccatggtgggggccctgggcaatctgcatggtccagggcagccccggcctggacacctgggaggttcctgggctcctgagctctgtgggccgtggcccagcctggacacctgggaggttcctgggctcctgagctctgtgggccgtggcccaggggcatctccagggaaggtcgtcttcctgcctggtgccagagctgctgacagatccagagagggaggcttggccctgagcttcagacctgagtggggaggagctgatgacagggctggcattcatgtccccagggatagcaccgccctgcccggacactggtggaggtgccaccctggttccctcaggcagctgaggtcctgccgaggttcatgctcactctgtattgtgtgcaggcgccagtcgagggagggacaggagaggactgccaggcatctcctttccaaattacctcttcactaggagcattggttatttctgacttagtcattggctgaaaatgagagatataagggtggcactgtggtcattagaaccttctggaaagtgtgtgctagaggaggtcttcctataggacctgcccacaggcctccatgtgacactcagtaatagtcatttcatacgggggcttcctaagaaggcttagcccaggttcccttggccttcctgcagccccaggcactgaagcccccacccaggctccccagcaggtgtggctgtcgtcattccgctgctttgcacgctgtctgggcaggtgggctcggcagtaagtgcctgtcccagggatcaggccagcacctgtatgcttgggggtgggaatgggaaagaagaaacactgcctcagaggagaccctgggggccctgggctggccagggttgctgcacaatccagccgcccccaccagtgccgtctcacaacagtctgctagagaaaggtgccaaggagggaggagggccggtgagctcagacatgtggcctggatattggcctccagcaggcctaggtcaagtaccacttgccaggctgaagtggatgaggcagttactggccactcaggatcaccctggtggcattggaggcatgtcctcgcctcccttccttggttctggggtggtgggtgctcaggctgagcagtccatccagtgctttgggggcctgtgccctgaggccctggtcttggaagtagaaggtgctgctggccagggtagcccggtcctaggatcagttacttggtggggtgccagggcccttggtgcctgtctgattggattgcttgatggtctgcctgtggtcttcgtagtgtgtaactcagctcccggctcccagccctcaggcagagcttggcccagatctctctggttcccacactgggcctggcaaacagtaggcagttgcacgactggattttccctctggagcaccaaaggaatcttctttctatctagaaaagacggtgccgcaggccctggccctgattttggaggcttcagctccacagagcagaagagcgagccctgaaccccttagtagtcaggaggaggccgtgtgggctgaagagctcagagccctctcccactcatccatgggagccggcccctcccacactgtcactctcagaggagaccctgaggggctttttgacccccccagctcacattggtgggagtcaggacagaggagaagccctgaacctggaaacgacttttgctccagctgtggcttgtcacccgcccctgggccaccccagggcccctgttctggacggactgtctccaggtgcaaggaaggaaaagggaaaccaagtcctctcctaggctcctggaccgtgtttcacagctgaagtattgcccgcattctgccatagtaacctttctgttgaaacaccacggtcccctccggtcacaggaggagctgatttgtctcttgagatcctgcagctaggagttgccaggaccctcacgggcccctgcagagctgggatcccctgaaagctctctctctccatagcacccttaatgtcccgagcaaccccgcccagtctgcgcagtcacagtccagctacaaccccttcgaggatgaggacgacacgggcagcaccgtcagtgagaaggacgacactaaggccaaaaagttggtgaacaaatgcttcctctgctcccaccgcgctcactctgtctctcttcctctctctctgtccaggggtctcacccctcggcactcggcaatgcacggagctctgcaggaagtgggcacctggcgtgccgcaccctggcccactacctgctctctggcacaggctctctggcacccccattcctcggggagggcacagctaacaatcttaagttgctttttctctgtcctctgttaacccttcaaggccctagcagcaccatgacaggaaaacagacaacgcgcagtctgtgctggggactagagagtgaggccccaggttggcctctgctgtgggcatctccagccgcctgcccctggaaagcctgttgatggctcaggatgagtgtggatggcatgaactcacactagcactggctccacctgtgctccttcggaaggagccctcagccctgagccccaaggctccagtgccctccccttgcggggcgggggcctcacaccctctgccgccctgtgctgagggccctgtggcctcccctttcttgcagtgtgagcagctacgagaagacccagagctatcccaccgactggtcagacgatgagtctaacaaccccttctcctccacggatgccaatggggactcgaatccattcgacgacgacgccacctcggggacggaagtgcgagtccgggccctgtatgactatgaggggcaggagcatgatgagctgagcttcaaggctggtaggtgggctcccccagcatccaggggaggagggcttccaacctgcaggctgtgggcggtcttttttgttttttaagtctggaaaagttcttgctagtttcacttgtgagtcactgcaggcccttccccagtgccctggcttcattgtcaaaagcagccaattggctggatgtggtggctcatgcctatagtcccagagctttgggaggccgaggtggaaggatcgcttgagcccaggagtatgagaccaacctgggcaaaatggcaaaacctgtctctacaaaaaatacaaaaaattaggccaggcatggtggctcacgcctgtaatcccagcacctttgggaggccaaggcaggcagatcacttgaggtcaggagttcgagcccagcctaaccaacatggtgaaaccctgtctctactaaaaatacaaaaatgagccaggcgtgtggcggggcatctataatcacagttactcaggaggctgcggcaggagaatcacttgaacctgggaggtggaggttgcagtgagccaaggtcacaccactgtaccccaggctgggtgacagagcaagactttgtgtcaaaaaaaaaaaattagctgggctaattttagtggcacatgcctgtagtcccagctctctgggaggctgaggtgggaggatcacctgagcccagtagattgaggttgcaatgaatcatgattgtaccactatactccaacctggacaacagagcgagaccctgtcgcaaacaaacaaacaaataaataacctgggcaacagagcgagatcctgtctcaaataaataaacaaacaaaagtagcagattagctgggcgtggtgttgcatacctatagtcccagctgcttgggaggctgaggcagaggatcacttaaacccaagaggatacagtgagccatgttcataccacgtactctagcctagaagagagagcaagaccccatctcttaaaaaaaaaaaaaagtaggctgggcatggtggctcacgcctgtaatcccagcactttgggaggccgaggcacacagatcacgaggtcaggagattgagaccatcctggctaagagtgtgaaaccccgtctctactaaaaatacaaaaaattagccgggcgtggtggcagccgcctgtagtcccagctactcgggaggctgacgcaggaaaattgcttgaacccgggaggcggagcttgcagtgagccgagattgcgccactgcactccagcctgggcgacagagcaaaactctttttcaaaaaaaaaaaaaaaagcggatgcccaatgccaagactcagaaatagtgaggtgctgccaagccagtgcctggactcctcaccttgctgggccaaggctgtgaattgcagggcactggctagtcacacagaagggcatctggagaagctgttggccaggaccaccaggttcccccatatgtagtctgggagctgctagccccgcagggccatgagagaagcctttctctaggggtccccaactgccagagaagccctcaggagagccacagctttgcccagaccccagagtagcacttggcatgcccctgggccaggtggggccttgtctcaggcagcaacttgtgtgtgtgcacacctacctgcccacacctaccatgcacacaccaacccacacacatatctgtgttgctaggagcagaaaccatagttttataaaacagcctggatcctgattacatgtgctctgcctgtgaagactttctgtgcaatgtctttttcttctttgaatggtcttcaatgataatcttttttttttttttttttaatagagacacggtctcactctgttagccaagctgggttacagtggtgcgatcatagctcacagcagctgcagccttgatctcctgggctcaagcagtcctcccacctcagcctcctacgtagctgggaccacagatgtgtgctaccaccccacccactataggaatcttttttaatgcatttgcagtttaccaaaatggcttttcacatcttcaatttgaaaagtgttatcttgtccgggcacgatggctcacacctgtaatcccagcactttgcgaggccaaggccgaaggatcacttgaggtcaggagtttgagaccagcctggccaacatggtgaaaccctgcctctattaaaaaataaaaaaattattcaggcatggtggcacacacctgtaatcccagctactggggaggccaagagaatcacttgaacctgggaggtggaggttgcagtgagctgagatcataccactgcactccagcctgggtgatggagtgacactctgtctcaaaaaaaaaaaaaggaaagaaaattgctatcttagcacctaaggaagctggagtggcctagggccaaagtggacccacagcaacccagattcttccctctcttgccctctttgtgaagctcccccagaagcagcatctaccactccaagagggaagctgggccagaactcaacccacacaggctgaagtgtgcccttgcccctaggctacacttgtgggaaaggctgccttaccaccaccaccccaacccctgactcagcagggaagccagggcctgggggctgtgcccaatggcctagcttctaaccagtcttcagcctcctcccctcagcacccagagtgccagcctgctgtccccagacactcttcccctgggctggttatcagctgcctctgcccagtttgagaagttgggtttttttgtttttttggatttttttttaatgtgcctttaagccatcttcatccagtttctgatatctttggttggggttgttacccccgactttgttggtttatttgtttataatttctaactccttttcaatcctgcctattgggtttgacagtaattttgtagatttaaaatgtttcttccagatccaagtaaattgtcaaaagcaaactgattgaaatgaaccttctaatcaccagttcacatttgcacaatgtgaaagctttcctgtccgttctattttctgtgttatcctgctttttaacaatgcaaaattagctcccagccagtgtggcttgacttacgtctcttgcggtgttctggctgtttgccacatggtagtgtggggttacaggcctcatcctagcctcggtagcctggatccaggcctgtgagagcacagcaaccaatgaaggcaggacaaaagaaacgccaggggcccgaggcacgaagcggtggaaagagatggtggttcatcgtggctgctgccctgtggcccctgcatctgctcctgatgcctctgggttagatctgcaggcgcactggtctggcagaagcggcacgacagtgggaggctgagccagtgcttacgcatgtcccaccctcccagggttctttagtgtcttaacacttaatcttcacagtacccccagtccacagatgagggccacaggcccagggagtggacgcagttggtccaggtctcccagccagtgagtgatggctgtgggatttgagcccaggcagtccggggagcactggaagccccaggtattagctccgcaggcatgttgaccagcattgctgccatacaaaatccaaagcatcagggaaatgctaaaccagggggaaaactgcatctaattctgaaaaatggaccaaaaaatgccaaagagagttacaaaacttcaaacttagcaataaaggcaaaacagcactgggactatttctttcccaccaattgcttgctcctgacgaggtccgagccagcaggcccaactggccttccctgcagtgagttaccaaccagaagcacacaggcccctgcccacccctgggctctgagctgctctgcttccctaacctggcaaatgccagacctggggccctaccctagtgccacctccccctcaccaccctagtctgcctccttgagaccaggatccatcagttcctctcatctctgtatctcctcttctacccaaggcctggccagaagtaggaggtccttcaggttggaacaaccaaagataaatggaaccacgttaatacattagagccacagggagattccagaacagcgccaggggctccttctcagggtctcaggaagggttgacacatggcaccgtgcacaagtcatcagccaggtgctggggataaaatgacaggtatgactgtcagacatggtcccttcccctcgcagcctggaagttgcagaggagagggattagcaaaggcagagagaccccagagacagctgctgggagcaaggcggccggggccctggggaggggacagaagaggcccaacgtgagggaggggcacaaccgagggacgattcctgccacctggccagggtggtgaggaaggcacagccctatggagctggatgccgcagtctcagtgggagccactgtggcagctgagagcagcttgttccaaattactgtgtgagactgtcatctctaggtctgtcagaggcccatgaccaaagaggcaacttaaaatgcatgcatttagtagagaaatgaccaggccctcggcctgcccgccacagaatgcctggccctccaccctctgtgggctcaaagctcgtgaatgcggctctgtagcccaccgtcggtgtcatacctctcatggagacggctccctctttgtcttgcaggggatgagctgaccaagatggaggacgaggatgagcagggctggtgcaagggacgcttggacaacgggcaagttggcctatacccggcaaattatgtggaggcgatccagtgatgagtcggggacaggccagcggggggacggaggcggcgggcccaggagcctcagccagccacgtgggcatccactccttttcctgcaagagatgatggttccattgctcttggcttcatggtgttcctggaaggcagatgagctggtcatttcgcctgggactcggcacctttccgagtgcagctggagggatctgagcgcaggaagacgcagaacaacagaaatagccgcccctccccgcccactgtgcctgttggcctatcatagatctctatgttcttgactttgtctctcctttccgagtcaatggtgggttacactgatcttgttccactgattactctctctgacgagtccatcacctgcaacttaaatgaacaagcttacatcccattttgagtgaagattttgaggtttttaatttaaaggctgtgtacagttatacttttttatacacctgttcatttctacttaaattatggcacagattgatgcgcaccagtcttgaggaaacgatctccctattcccttaccctgttactcagccacgccgtgtgtaggcttagcctcaggtggcagatgtttgaggaaaggaattatgccaggaaggtgggaccgggttatggtcgggtttctattgggaatgctctttgtgcttttgggcatctgaatggaagctttacatagaaccttaggtagaactcccccaaatcgccatatttaaaaattattttcactctattcttgcttaaaactgtactcttttgcaaattaacaattttatcactgattcagagttaaaaagaagactaacttttcaagcaaatgcatctgtaaagatgctttagattagactgtcatgtctcagtgtctatctgtatatattatttgatattcagagaatctaaagcactcgtctactgttttaatgagatttaacagcttttaacagtgagtttcgtttgtaaactgcttgaagtctgtggcattcaggcacacgtctggctggccggctgggtctcctcccgggctcagtgggcctggggcctctctgacgtggtgcctgctggagggaggctcgtcgtcaccagctgactgctggtccggcttctgaccggcctttgtcctggctccgtagcagaacactgtaaaagtgcccgcgtctttgcagtagttgcagatttcagtcgtcgtgttacttgtgcacaaacagaagctgggtcttacccgcagcacgagtgtctcgggctgcccggagtcgcccgggagcaggtgctgcagccagagttacgcgggggccacgcgggccggcgggggtggggggaacgtgggggaacctgtgtttcacgtgactcagcagtgcccgccgccgtcaccagctatgcattcactccgtttccagtgagcagatgtcttgcttggaaagtggacctgtgtctgtgtctgtcctgagaacttaccagcagaaatcctcatttctgtgctacggatttaccaaaaattgtcaagtctttttcagtttaacagttcctttacatgtgtagtatttgaggaaaaaaatcaataaacagttgatctcgtgcatatggaagtcccttcgccatcatctgtcttcatgcccacttcacttggcgggggtggcctccctggggcttactagctttggagctgggcaagatccagggcacaggacccctgcccaaaaggccacggcccactgcccctgccaaactggaggttggggatttgaggcacctgagccccttggggttcccttctccccgagacctgctgctgtttgacctgggcttccacatggtgcgggcatcggctggcgcctctctattgccccagcccaaacagcaggacaagactgacatcacccataactctcctatgagcacattttcctgagcacctactgtgtgctctccactttttacttacattatctgcgtctccaaacatctccacagggtatgggcaagtctccccatttccattctaccgaggaggaaacagaggctccaagagccagccagggtttcttgaggagtctcagccagcccaaagcactgagcgaaatccctgaggaaccaccccctccctcgctggagaaactgaggagggaggaggcttggactggcttgaagacaggagagaagcaagacgtgagggcggctgtggccacgctcaccgagccctgggaaggctgcccagaaaagcacgccagctgggcatggggcctcacagagcacctgggaggagcaaggcaggcagctgcccctgcagtgtggctttgtcccagctcagcaagggtatgggacagatccttgtcacgcagcctccttgtctgaggggtggcgggtcccctgctcccagcttctgaggagttggagccctacagcgcagggcggacacccggctcggcccacagccccaggctgcagagaaacaggcagaacggggttgggagggaaggtggggggtcagaagcaggctcctggtgccagtggcctcagtcactgcccaaacaccatggcaagaccacggtccccgctgagctggatgaagcaacctccactctgaggctggatcacacggccccccccgtgagagatctggcagggcctctaactgcccatcttccctctcctgccctgccctcaggggccagcttggaaacttcagcttgtctctaggcctcagtttccccaagtagaagtgatacttttccagttggagagttagagcaagaagaaaaggtggcctgggcaacatagtgagaccttgtctctacaaaaagtttaaaaattggtcgagtgtggtggtgcatgcatctagtcccaactacttgggagactgaggcaggaggattgcttgagcccaggaatttgaggctgcagtgagccatgattgcaccactgcactccagcctggacgacagagctctcgagacagtctcaaaaaaagaaaaaggccgggcacggtcgctcacacctgtaatcccagcactttgggaggccgaggcgggtggatcacgaggtcaggagatcgagacaatcctggctaacacgatgaaaccccgtctctactaaaaatacaaaaaattagctgggcgtggtgcctggcacctgtagtcccagctactcaggaggctgaggcaggagaatggcatgaacccgggaggtggagcttgcagtgagccgagatcgcgccactgcactccagcctgggtgacagagcaagactccatctcaaaaaaaaaaaaaaaaagaaaaacgccacaggcactcaggagctggtcattgtcacgattatgagtgacaccataggcaggggcccagggttctctgctgtccatggctgcccttcgctcctcccacagccaccaccctggatcagtgctgccaccaactgtccacacctcttcgggtccccaaggcccctgagttgacactagggggagtgttagccccagagccctctcctgggccaaagctacctggagctcaggacaggggtatttcatcatctctctccatccttcccacaacccagaaatgtcgggagggtgagcaagtgc

SEQ ID NO: 3 - DNA, 15981 bp, Homo sapiens
cagtacatttgtatgtagaagtatagtatacagagataagaatttacaacatagtgtgtgcgtcagtaatttctaacagagccttaaaacagaaacacagtctttccataacctatgattagcaagattttaatcagtagtaaaaactgcaacaaaagctggttacaaacaatccatggaaacaggaagctagacaaccggttagaccagaaattctcagaagggagtatgccttaaccctaaagaggcctagaagagccacggcaagatgagggcgtttatagccctatcttatccatatggacaggcaccccctatgcgtccatttataggctctccacaagggtcgcattccattcccagagctatgaacatctgctttgctgggatacgaatcttggtgatgtgaaacttccctgactgcaagtccattcataggctctctgcagggggaagcacatcacgtgctattggctcattctggcagtccaacctggcattgtctttacacaatcctgcatgcaattttgtatttacaataatcaggagcatttcatcttttattccatagcaatagtttcagggggtctccctacaatgaagttgcgccacatcggccaggctggtctcgaactcctgacctcaagccacccacctgccttggcctcccaaagtgctgagactacaagcctgagccaccgtccctggccaaaaaacaaaaaacaaaacacacacacacacacacacacacacacacacacacactttaaagatatgcccacaccattttctccccctatttatagctgtactttgtctatgttgttggcgaatgtaaccattacactccatcctctcctttttactcctcatcttctcttggttctccatgtaaatatatctttaatgttcacaccaggctaatgtcaatgtctttttagtctcgttggttgtctgaagcttattttctagtaattcctcaggaaaggctttgggaacaatattctctgggttcctgcacattggtgagaatctgctattttttttttctttttaactcactctgtcacccaggctggagtgcactgccgcgatctgggcccactgcaacctccatcccccaagttcgagcgattctcctgcctcagcctcctgagtagctgaaattgcaagcgtgcaccaccacgcccagctgtttttctattttcagtagagacgcagtttagccattttgaccaggctggtcttgaactcctgacctcaagtgatctgcctgctttggccttccaaagtgttggaattacaggcgtgagccactgcgtccggcctgacaatctgctatttttatacttaaaagttagtttgaccaggccgggttgggtggctcacacctgtaatcccagcattttgggaggccgaggcgggctcaccaccggatgttgagagttcgagaccagcctgaccaacatggagaaaccctgtctctactaaaaatacaaaattagtcgggcgtggtcgcgcgtgactataattacaggactgcccagtggtcgggaccctgctaggttccagccagtgggagcggatggggtagtgggaaggcggggcctggcgggtgagggcggggcctggcaggtggggcggaggccttccgggggtggagccggggccttcctggggtggagccagcggccctgggcacagggcccgccggggctctggcagggcggtgggaaggcggggccttctgaatgggggcggggacggctggagttgcggggactgctggagttgcggggcttgcctggggtggggcggggcggcctaggggtggggcggggcggcctaggggtggggccgcctaggggtggggccggcggccctcgggatgggtcctgccagggcgcagagatggcggtggaaaggcggggcgaaggcggggcgtgaggcgtggaggtgtggcctgactggggcggggcggggcggggcggaacagcctagaagcagggcctggaactgcaggatacactcccctcctgctacctaggcaggcgtgagggtgtgacggccgcgcattcgccagacgagagcgatggctgagaacgccgcaccaggtcgccttagactcaccaggtcgccttagacttagatgggacggggaggcctcgcgcgagcgccccattgcccacccacctggttgggactgtggaggagggcggatggagtggagggttcaccgaccgcgtcgcccttctgggtgtcgcagctccttcctcggcagtcccggggcgtgagagcgcgaccggccgggagttgggggacccgggacacggccgcacgtggcctcccagggttctaggagaccctgagttagccgggcgtgcgcgtgggtgtcgggggcgcgcaggtctccagccttgcagagacggaggaggctgccagctgtggggggcggcggtgggtcctggagtcccaccgcctgccctaaatttccactccgcccctgtcgcccagtgtgaccttgggcatgtactgcagctcccagtgcctcagtttcctgctctgtggagggagagtgacagtgctcccacctgctgcgtgtgtgagggtttggcacccctctggcctttgtgaaaggcttaggaaacgggctgtttctttactccggttttacaggaaaggaaactgaggctcaagacgttttagtaacttctccaaggttacccagccagcaagtgatggggtccaggcctgaccagcgcccccgccccagcacattctagaaggttctgccccagtttaaatggggtgcatgctctgaggcctgtcacagctttttccggcttagcttctctgtccctcctctgggagtctccactcccatgtctgactctctccccataaccttctggggcagctaagggtctgagtccctctggacatgagcccctggctcaagcacatcagggagagataaggggctcagggagcaccagcttcatgggtgaatgaatgaaggaatgaaagacccggctgtgtctttcaggtctgatctcagagctgaagctggctgtgccctggggccacatcgcagccaaagcctggggctccctgcagggccctccagttctctgcctgcacggctggctggacaatgccagctccttcgacagactcatccctcttctcccgcaaggtgtgaggctggggctgaagggaaggccagggggaaagtgggcaggaaggtgaggggggaggtctgcaggggaatgaggagggcggggagacagctggcatagacacctcttcctaccctccaacccgcttctctctgtttcagacttttattacgttgccatggatttcggaggtcatgggctctcgtcccattacagcccaggtgtcccatattacctccagacttttgtgagtgagatccgaagagttgtggcaggtaagaaacagagtgtgtattttcggcggtgtggggggtgctctagggcaccccctcttatcactggaggcggggtaggatccaggaagcagcgctggcctgagagtggggcctgggctctggccccaggtctgccagcaattcacgggagatcttgggaaagttgaagagttcgcttcctccagtgggtcccccaagctagtgtcctgggtggacaccccagatgctgggaagggatttcctgagcctggggactagaagcaagatcgtgggctgagcctgtgcccagccggaccttctggctccttgcatttccagccttgaaatggaatcgattctccattctgggccacagcttcggtgagtacagtggccaggagctgaccgggcccggagtagggctgggagggaaggataggagctgctgccccacccctttcccctgcacttatgagatctgcaaagagagatgagagggtcagtcagaggttgaccactgtaccctctgacctcaggcaactgccgcaagggacacagggatgagggaaatgtggtcttttgagtggtcaggtctgatgaaggggacatcatggcccagatgctgagcccccagccacccatatggtgccccccccccaactggtgggaagaagctttagggtatgcagctggggagggagtgagggaatgtcacccacagctcttttgtcccccaggtggcgtcgtgggcggaatggtgagtagatggctttgtctggccaactggggctcccttgggtggagtggggaggggagcacaaaggaggaaggagaaggtacctgggacagaaagtgcctcctcctgtcacagtgatagtccttataccaggaagttggtgtaaacggtggagactcctggtagagttcatgtttccacgcccccatacccggtcccaccgcaccctggagtccagccatcaccaaggtctggagctcagtgctgggtgcagacttaggggtggtgggggaaggcacaccatagatagaagattctcctctggcctcttggtcagcaccctccccccagcctaaaagatgtttcggggaactccagggtccccagggaaaggcgggagtgtcctttccttcttcatcctattcattctccccttttggcatcctcacagtttttctgtaccttccccgagatggtggataaacttatcttgctggacacgccgctctttctcctggaatcagatgtgagaagcgggctttcgtgcatgctgtcattagggaggacctgggccccgggcagcgctcccagccctgtctcctttggtggacactagggaagcacgaggaggcggcagagggtgggaaaggggagtcagggacccgctccccaacagatgacacccttctgctgcttatacccctagcagtggtcaggacaaggggtgtgggggaccccttggaaactggatgtgtggctcgggatctgcagaatgccaggctgatcacgcagtggcaggcagtggaagagggcagcggccatgggtggaagatgttctagggcacacagctgggccggcacactgcactcacacccagtcgaatgcctttgcactgtgtccacattgcaccaccacacatgacagccctaaatgtgaactgaaggaacaaggactgacccctctgaccaccactacccataaccagtactgtctctgcgtctgagtcctggcctggtttacctgctgggtgacccctggcaagttactttgcctctctgggccttagttcccgcacgtgtaaaatgaggttgggctcaatgacctggccagctctgacatcctgtcattttcttgccaaggtctcagcctatcagttgtgacacaagtctcatcagtttcagttttcttgtccatagaatgaccacagatcggccagatgcggtggctcacgcctgtaatcccagcactttgggaggccgaggctggcggatcacctgaggtcaggatttcgagaccagcctgaccaacatggagaaatcccgtctctactgaaagtacaaaattagctgggcgtggtggcacatgcctgtcatcccagctacttgggaggccgaggcaggagaatcgcttgaacccaggaggcggaggttgcagtgagccgagattgcgccattgcactccagcctgggcaacaagagggaaactccgtctccaaaaaaaaaaaaaaaaaaaaaaaaaaagaatgacggcagatcccataaggataaggatcatgtccatctctgtcaccacatccccaatcctggcacctagtaagggctcagtaaatgttccttgcatgagctcagctagctcaggggctattataaggatccaatttacagatggcagacagcagacactcccttctttctgcatttcacccactgaattgacaagtgcagtgcccccaggggcttcctcctgggcgagtcaagaggggcatttggtcctcttgtcctgcattctcaggcatgggtagatgggagatgcccccctctgcagccccaggcagtgggcctgaggctgtcctcacagagtgagccacacatcatgggggagcttggaagccccagaaatgcgccctttctgccagtccctttctgccactgagaatgatggcattcgttgaaccagatgaaactgccaaccccagatggttcgtggcctccggaccctaatttcatgcctttgcaaagcacttggcagttgacagagattccccttcctctccatcatcccacctgatctcttcaactgtccctggccgcaggcaagaccaggctggctgtgactgaggcgaagcaaagactcgttcagaatcgtggggctgactagccagggctggggctgtgtgcccctttgccgagaggggctcagctgagagcagagggcagggctaggaggggcagagacctcgtctgcagcctggatccctgcccaccagccaactgtgcctccttaggaaatggagaacttgctgacctacaagcggagagccatagagcacgtgctgcaggtagaggcctcccaggagccctcgcacgtgttcagcctgaagcagctgctgcagaggtgggtgcccggtgtggacggggagctggtggggtccaggggaggacatcccgtgagacgtggagaagcttctttctccctctcacccaacaagcctgtttctccctggggtcacgctgagcaccaggcttcccagggtcttcagggacgttctctctttccctctgcccctgctccagccatgccccttacttccaataccctccccacacctctcacgcacccgcctctctcccaagcacatgctgcttccacgccttctctcccctctgggactccagcctgggctcccttacctggaattctcccctgtgcttgctcactggcttccccactccttggggcctcagctgggaaccctgccctgacacccccaggcaagctgtccctgccctgcaggtaaccacactgtccaataagagcctattgattcctctgtttcccgaggcatgtgaactccgcaacccccactatggctgatttggtcatctttgtgcctcctgcatctggcagtgggcctggtaggtcagagctccacacatatttgttgtctgaaggaggagaagccccccactgccccaccacacgcacgcgcacacacacccacacacacacaccctgccgctgtaaacatgcaatcgaaacacgggacacaggccaggcgcagtggctcacacctgtaatcccagcacattgggaagctgaggtgggaagatagcttgagcccaggagttagagaccagcctgagcgagatagcgagaccctgtatttaaaaaaaaaaaaaaaaaaaaattagctggtcgtggtggcacacgcctgtggtcccagctactcagcagccttagttgggaggagtgcttagccccaggaggtcgaggctgcagacagccatgatcatgccactgcactccagtttgggtgacagtgagaccctgtttcaaaaggaaaacaagggccgggcacggtggctcacgcctgtaatcccagctactcaggaggctgaggcaggagaatcgcttgaatgggaggcagaggttgccgtgagccgagagagcaccactgcactgcagcctgggcgacagagcgagactccatctcaagaaaaaaaaaaaaaaagaaattacataggtgacataatacataatgattgtcaatttaaccgtttgtaagtgtgcacttcagtggcattaaatacagtcgatggaggtgaggagaggagggagacatcccaggcactggctgctgcacagggaaaagctcgaagtcagctcggtgcatctgttgagagggggattcctgatagaggctgtgaagattaaagaggggaggggcaggatgacaaaggttctcaaaaaacagcgtcccatctggaggcctgtgtcactggagacttgtattaatagaaacttggccatctctgccagtgaggggctgtaggaccttgggcaaggtgcttaccctctctgagccttggttgtctcacgtgcaaaaagaaagtgctttcattcgctcagctggtttatgagcagcttggctaggggagccaagccctgggcctgcctttgaagggttgttgtcgagactaggtgaggtcatgtgtgttgagtggcctcgcacagtgctgtcgcttcaggtgctcatggcctgtgctattttgtgattgttaaaatatggtagaacattggacacatgtgagacactgtcattagaggtggggatgctctaactgcagggagaccgctgagagctgctgcccaggcccaggccaagagatgaggcttggaccagggcgtcagccaatggtctgggaatgttaacgtgtttgtctttgatccgtgtgggatttgttcttgagcatggtgtcagatagtgattcattttcttttttttttttcatgttttaaaagttctatttttctttattattattattattattattatattattattattattgatacagagtctcgctcttgttgcaaaggctggagtgcaatggcaccatctcagctcactgcaacgttcgcctcccaggttcgagtgattctcctgtctcagcccccaagtagctgggattacaggcacccaccaccacacctggctaatttttgtgtttttagtggagatggggtttcaccatgttgtccaggctggtctcgaactcctgacctcaggtgatctgcctgcctcgacctcccaaagtgctgggattacaggcatgagccacagtgttcggtctatttgaattgtagagacagggtctccctctgtcacccagactggagtgccatggctcaatcatggctcacgcagcctcaacctcctgggctgaagtgatcttcccacctcagcctcccgagtagctaggactacaggtgtgcgctatcacacccagctaagttttttacttttgtagagacagggtcgtgccatgttgcccaggctggtcttgaatgcctgggctcaagctatcctcccgcctgtttcccaaagtactgggattataggtgtgagccactgcagccagccattgtaattgtttttctagatgaacagctagttattccaataccagctgttgggtggtcctccctacccactaaggctcactcactggtggtttgtcccttgtgtgtgctgaccttcgtggtgggagtttattgccagatcctagtcaatctgacttttggagatgcccctttccctgtccttagggaccatgtcttatgtgacctgatctgtagtgggatctgtgatcacccataatgctggaaggaggaggcttcccagggatggaaagacttcgttaggacataaactaaattgcagaagatacacattccaagatggggctggcccaaaattctttttttttatttttattttttaaatttctggccaggtgcagtggctcacgcctgtaatcccagcactttaggaggccgaggcaggcagatcacttgaggccaggagttaaagaccagcctggccaacatggtgaaaccctgtctctaccaaaaaatacaaaaattagccgggagtggtgacacacacctgtagtcccagccacttgggaggctgaggcaggagaatcgcttgaacccgggaggcggaggttgcggtaagctgagatcacgccattgcactccagcctgggcaacaagagcaaaaaaaaaaaaaaaaaaaggttctataaattcttctcatatttttatttaacatccacaatgtgatttaagatgtaatcaacataaagcttgattgcattattttgcatgctgttttccaaatccagcttcgtgtcacacctacagcacatctcactcaagctggccacatccccgccatccagacgtaaaacagtcacaagacagggcaggcagggccgcggaggaggctggctggggccatcacggagtgcccatcctgcactgtggtcccagcaagtttctttctcctggcaagaagcctgtcccaggctggcaggggacagcgtgaggtgcagcctatggactgggaaaggggtgtggaagggccacacctaagtcctaaaatccaggcccaaaagtggcccaactcacttctctgactttaatcacacagccatacctggtggcaaaggagtattggaaatggagtcaggctgggtagccacgagcccaggaagaggggagaacagacttggagagggcaggagtctctggccaccaggggctaaagagccttcgatgaggcagtgatgtggggtcctgggctcagacccagggtgggtggctaaggtgccctcgccagggcttagccaccccaacagagatgggtttcgtgcccacgagagtgcctgtgccttgtgacgagaattcaccatgtttttgtctctgcaggcagagaacagcattgacttcgtcagcagggagctgtgtgcgcattccatcaggaagctgcaggcccatgtcctgttgatcaagtgagtctggacccatccccttcagtcaccccccaaggagacatgggcgccaggaatctctgggagggggccctggcatgaggctccaagttctctgcgtgtcgaccacatcgctaagactcaagatcttttttgggaagcccccctggcagcagggtcatggaaggaggaaggtcagaggaggggagggctcaggcagcaggggatgggccggggctgtcccatgcctttccacaggtgtcagcggggggcatgcccaggtaaggctccataaccagtgagcccagtctcgactcactgcaacctctgcctcctggattcaaacgattctcctgcctcagcctcccgagtagctgggactacaggcgcccgccaccacgcctggcttatttttgtatttttagtagagacgaggtttcgccatgttggccaggctgctctccatctcctgacctcatgatccgcctgcctcggcctcccagtgttgggattacaggcgagagccaccgtgcgtggcccaccatagacgatttttaagccataaaaagaaacgaagcactgacatgggctccagcatggatgagccttgaaaacatcgcactaagtggatgaagtcagacacaaccgtctacgtgttgtatggctgcattcacgttcaagtccaaataggacacacggcagagacaaagccaggtcatggttgctcaggaccggaagcctgttgggggtgggggggtggggtgtgtgtgtgtgtgtgtaagctcagaggtttgcgatttctttgggggtgatgaaaatgtaattgtgacgatggtctcacaactcaatgtattaaaaaccacgggattgtagacttttttttttttttttttgagatggagtctggctctgtcgcccaggctggagtgtagtggtgcaatctcagctcactgcaaggtccgcctcccgggttcacgccattctcctgcctcagcctccggagtagctgggactacaggcacccaccaccaagcccggctaatttttgtatttttagtacagacagggtttcaccatgttagccaggatggtctcatctcctgacctcgtgatccacccgcctcagcctcccaaagtgctgggattacaggcgtgagccaccatacccggccaggattgtagactttcaatgggaggattgtgaagacataaattctctctcagagcaagtgtgggctccagcgcctgttcagatcccagctctgctgttcagggctgactgtgaccaagtcctgaactccctgcgccccagcaaggctgtgccttcagcacttgcttgcgcctggcttgtgccagctgagcgtgagctgagattaactgagcctcaaatccaacccagggtcaagggacccagctgtgggagttggggtagcccaggctttggtttctcctcagaggcctgaacccagggcaggatgggggcaccgctgggaggcggttctaagatgaaccccaacaacccccaactcctcactttccagagcagtccacggatattttgatccaagagagaattactctgacaaggagtccctgtcgttcatgatagacacaatgaaatccaccctcaaagaggtaaggcggggctcaggcagctggtgtccagccactgtcgcccactctggtcccacctcacccatctcttctcatgcactgggaaagacccctggtctgcccccaggcccaacaagtgaccaccaggatctatcaggcctcatgctccagtgatcagtccctagaggcctggggacacatgtaatcagaatttaagaaacagagacctttggtggggaggttctttaccatcctcaagtacccacccctccttcttggggccaggcacaattaggtgacccaactgccagagacagtcccacattttttgagagacagggtctcattctgttgctcaggctcagtcatagctcactgcagcctcaaactcctgggctcaaatgatcctcccacctcagccacctgagtaggtggcactacaggcgcatgccatcatgcccagctaatagtcacactttttttttttttttgagatggagtctcactctgtcgctcaggctggagtgcagtgggaagatctcagcttactgtaacctccacctcccgggttcaagcgactctcgtgcctcagcctcctgagtagctgggattacaggcacctgccaccatgcccagctaatttttatatttttaagagatgggggttcaccatgttggccaggctggtctcaaactcctgacctcaggcgatccgcccaccttggcctcccaaagtgctggttttgcagatgggagccaccatgcccagcctagtctcactttataggctcccaaaccacagcagaacacctggctgcctcatccctctgcacccatcacgccagtgggcatgctggctgtaggtggggatggcctttgcccgggttcctgggagcacctggtgttttatggtcacctacccacttacacctgaccctggggcctctgcagttttcttggcgttgtcaccacaaaaggaagaagcccacctgtggctggctggctggccgccaggtcagagccaaggcaggcagggccttcctgtctggcttcttgaaggcagacacaagtctgcaggctgctcacgtcatctcattatcttttctcacgaggactacttcggatacaatcacagcaaccctggcctcggccctgccctgtccctgccatgcaacttcacaactcagctggcctagacccctgggaggcctccaagtccctaaggttagacatctcctggggtgctatggactgtcggggctccaaggagccgagtgtgggggaaactcactgtgggaggcgctcctgacctgcagggagctggaatgctgtgggagggccctgaccccggggcccatggagctccctaggctcctctggccacatctcactacccaccccctcccctctccagcggttccagtttgtggaagtcccaggcaatcactgtgtccacatgagcgaaccccagcacgtggccagtatcatcagctccttcttacagtgcacacacacgctcccagcccagctgtagctctgggcctggaactatgaagacctagtgctcccagactcaacactgggactctgagttcctgagccccacaacaaggccagggatggtggggacaggcctcactagtcttgaggcccagcctaggatggtagtcaggggaaggagcgagattccaacttcaacatctgtgacctcaagggggagacagagtctgggttccagggctgctgtctcctggctaataatctccagccagctggaggaaggaagggcgggctgggcccacctagcctttccctgctgcccaactggatggaaaataaaaggttcttgtattctcactgcttttgaggctttttcgttgccagcaagggcttttgcattgagggaaaaggaagcacagaacggattcatccagggtcctggagaggagggtgtggaggcaagaagcaggaaggacaagtcctcctctcggcacgcctgggtccccaggactgctgaagcacaagacccgaggggtggcctggtccttccctcctggcctgtgtggactctgatggggctgttggacgcggtggccttcaacctggggcccgttggccagagctcggcctctcagagaccgctgcaggccctgcctcgcctcctcctggccctgcacctccagccattcactgcggctctcacagctcagtacggtcggaatttgcgctgggcccgcagcagctcgatcctctgcttgtcctcctcgaacttcttgcgcagctgcgctagatctgggggtgagaggaggcgcggggcagggtcagacagcgcgccccggggaagctggcttgctcatgccccacccctcctcccagttactgtgggggtggggctatgtctcccccaccagcccatccccctcccagctctgctgtgggggcagggtctggatcttgtcaggaaacagaaccgacggcaggccgagtccaagggcaaggccaaagtgggagatgctggcacccccagcctggagatgaagccctagcgacaaagcaaaggtacccgcccccacccccatccctgcacagggggaaggaaggagtcttgagcgctcggcctggagaaccctgagaatcagtaaaggcaccccagcccttgtgctggtgaatgcagatggcaaccctggtcagtgggaggctgatggcactgagggggaagctgagggtctagagcgagcacgagcgggagccaggagggccagccaggcagggaaagcaccagtgactgggcgggcggctcagggcctgccgcagagcccgtccctgtgccctagccagggccaggagaaccctcccctgggcccacagggaagctgttctgtagacagggacaccaggcagtggggcaggaggctcagccgcagcaccaggagtgggccacaggcgatcgggcccacaggcatgggagggtcctgtgcggggccacctgacagacacacacacacacacacccaccaccaacccaacacacatactctgcagcaccttctctgcacccacagtgggttcagaagccccctctgcacttgaactcctcgttagctggaggctgacgagcgccagcactaagtgcacagggacccagaggtgggcactgatgacctagggtccccacccactgagcaaatgcatctgcccctagggggtgatggggaaccgccacacagggtgctgccaggctgggcctctttccacagagtctggtgcgagccccgtgcttagggacgccctccctcctcgaccaccaagtccagcgcccgccctcaggagcactggccacaggcctcatccgtggctggggccaaggccgaggggtctgaggatggactgggggtggcttacgctccatcttgctctctcgatgctgccaggcgtagaagttgagcagctcttttcggctgcgcttccgtctctccctctccagcacccgcaagctggctgcctcagtccgggggagcacaggccgccggccccggcgggtcaccttcacccagccctcctcgtcagggaccccctcctcctccttggccttagcttcttcctgcaaggaaggtgatcccatcctccggtgggacctcctgcagcctccagcagcgcgccctccacgccctcctcccaaagtcagaactgccctgagcccccgcaggggagggctgctcccctcctcccagcacagtgttggggctaaggatggcggggagggcacggacctgccggcactgcctccttctccactgtaggacatgtggagactacatgtgtcacccagccaggcagcccaggatccagcagggaa

SEQ ID NO: 4 - DNA, 19542 bp, Homo sapiens
aggcatggtggtgcacccctgtagtcccagctactcatgaggctgaggcgggaggatcatttgagcccaggagttggaagctgcagtgaactgtgattgagccactgcattctagcctgggtaacaaagcaagaccctgtttcaaaaaagaaaaaataaataaataaaaaggaggaaagagagaggagaatttaaaggggaagggaggctcctctgggtagagttctcaggtggggctgtgaaataaaatcagaaccctggctgggcgcggtggctcacgtctgtaatcccagcactttgggaggctgaggtgggtggatcacgaggtcgggagatcgagaccattctggccaacatagtgaaaccctgtctctactaaaaatacaaaaaaattagctgggtgtggtggtgtgtgtctgtagtcccagctactcaggaggctgaggcaggagaatcgcttgaacccgggaagcggaggttgcagcgagctgagatcaagccactgccctccagcctgggcgacacagcaatactctctaaaaaaaataataataattcagaacatccccaggtaaccacaggcagcatttctcaacagtctctcctgcagaaccagaaacccagactgtctgagcctgattgtcctgagaggttctggaagggcaggggcgtgtggtgacactgggtgctcctgggttccagtacctctctagccagttggaagaatataggcaagtcaagtccttcctcctccctgagcctctaattcctcaccggtaaagtagggatgataaaaataaattattaaattgttgtgaggtttcaatgagggcaaagcttgctgcctgaaacagagcaagctcttgtggcgtcttagctatttgtattagttacttgtatttttctctgcggtttcccttttaactcccacctcctttttattttaaaaagactccttttgaaaatgccagcctgcctcagtagtaccaggagacaccagggaaaggcttccttctttccaagctgaggctgagaaggaatgggaagaacgaagagaagcacctttgtggaggcctcctccagctggccctgggtttaggaacatcacacactcaacctccaaaggccctcaggggctggcccaaggtcacacagcttgacagtgcggagcacttcgaagccagggcgtgtggtgtagaacaggctgggtgcctgaattcaatcagccctctctacttctctactcagagcctcccaggctgtggggtgttcacctgtgcaccttcaagccgatcacttccttggggtcctcgtcaattcaattccatggaaatattacaaggggtagacagagatgagccgtgtcagtgtctgtactagcagagggcaggaccactgagcgtccggaggggagacgagtgtctgggtgtccctgggaacctggcttgtctcgacccctctggggggctcctcttggctctgacctccattctcccagactcacccccactcatgcccacccaccccgaggggccccccagtgtgcactcacacactcacactcaaactcaccaccccacttgctctctaattaccaggaacgtggcgctgtctcaggttcttcctcccctgcattcctcagcagctgccctcactgggcagggcaaattataccgtggcccgaccataaaagccactttccaaaaaaagaagctttaaggcccccgagagacgcagctgagcctctcacctggcagtgcctgactcaggaggtgatgtctgggccatgagccacagagcctggtgtccctttaagcagggagtacaaattctcatccctccctcctgctctccctgacgtcagctggaaggcgtgtgagtgagtgaggggctgaggtaccgcccgcgcgagcacacacagacacacacacacacacacacacacacacacacacacatcttccagacccatcccctgcctgccagctccacgagccagagagagacagagcgcggacgccgcaggaggcagtgcctggaccccagctgcccaggagaggtgaggggctagatggggcctgaggacactgtgccagaaactgtggctttggccaggccgaaggagagaggtacaacgtgaaggtgggggctggatcagcccagttcagcttacagatagggtgttgggggtatagaggataccacctgtctctccctccctcattctctccccgtgacccccaaatgaggtgaggccgtgtggctcccgtgggagcatgtctgtgtctgtgtctgtgtctgtgtctgggacctgcgtctggctcaggaggcagagagcagcagatacctgccaagccgcagcctcctgtctgggaagcagcgggagagaggaccgccttgaccagagaaaccccagtgccgcttccagttgctgaaagcagagtgcagcagggacccttgctggtccttcccctggaatgttgggctgggaagggaccggctgggaaaggcagacagttggacctggagcagctgtcttatcctgactctattttttccccagtgtgatggggataattgtgttagttggcttagagaggtggctccgtgtggttattctcttcccccaggtaccaccccaccccgagcccttgcttcttgcctgcctgctggtctgctctgacctccacccttgccagggcacagcccccggagggcaggggtgataagtcagggcctgccaggcctctatcttgggatacagggacttagggtggccttggctggtgccaagcccatgaatggcctgaccctggcacaaggagtccaggcggagataaggggcgacgctggcacccacaaggagacagcaggttcctgccaagctgccagcctgcaggctcttcccagggagaggggagggggacacagagcgagaacaataataaatacagagtgtgaactgctgcatccactggggctggggtaggagaggaggaagtatgcccagtggggggtgggcaacctctctgagagcctggcatcatgctgcctggctgtgatccggcaggggcctctccctgggaaagggggtctccagctttctgggggatggggaactggtttcccaaacctgactccatcccagagtcctctggaccctccaaattctgaatgtttcctcctcccagctttgccctgccgccccccatttccttgaagtcttctccaaaaatgtctgttttctgtgtctgcccatcttgacccatcctcacccccttcaaaaaaaaaaaaaaagacaggtatagacaggaactgcctgcccgtgtcctgggaaaggccagaggacagttttggccacagatggctctcccaggcttggagagacatggctaggcaatgttcacggatgcgcagggggattccctgagggggacttggggacactctcagatggctggtggggaggggacacctgccagccagtctggagtagagccccctagggggtagagggcgctcaggacctggctgagccagtcatgtccacggtcacaactggggcagccaggacccagagccttgtaggaatggggcttggggcagttcagacctttgtccatgctgagcagcaaaatgggaggctaaaagtagtagggagctcttctgccccacagccagcaaaatgacactcctgggctggggggctggcatggcacaccagaaagctgtggggtcacactgattggagttcaagttcagatgctgtatgtatgtatgactttgaccagtctattcctctctctagggggtctcaaaatgggaaagtgacttgcctagggtcgcacagccaagcacaggtgggactggggtgcgtatttggctctcccagtgccgtcctggtttccccaccaccacccaagccacagaagcccaaaggccttaaccacagcagttccccagggcagcctgggcatgtgacaaggaggactacagggtctcttaaataattaagctcaagtattggctggggcagccctcatgcacagacgcaggcacacaggctgtgtgggggaaggaccaggtttaatcaggtcacctcaggctgcaagagcagttcaggcactgatgtattttaaggagcatctgggaggctgggggagggggaggagccagggaagtgtcagctcctgcccgggggtcctgagtttgttttctcactctcccagggcccaccatgcacaagctcccgatgttcgggaagcccttccagcgtcatccttgtgttccccgtcctttctatttttaaaccaccgtacccattcctcccatctgctcccctgtgatgggggcttggggctgggacatttttattgggggagttgtttttaagcttagcagagttggtgagtgactcacccaaggtcatggtctgagtcagcgcaaagccagaaataaaagccccagtcctggctccccaggaattccacacccgactcctccttctccaggggagggtgggcgccaccctcaaggaatggctggtcttcacctccccagacatctccagagggcagatatgctgcacctgacctgctgtgagagctcagcgaggctcttcacctctctgagcctcagtttactctttagaagatgggtgtactaagccaggcgcagtggctcatgcctgtaatcccagcactttgggaggctgaggcgggcggatcacgaggtcgggagatcgagaccatcctggctaacacggtgaaaccccgtctctactaaaaatacaaaaaaaaaaaaagaaaaattaaccgagcgtggtggcgggcacctgtattcccagctactcgggaggctgagccaggagaatggcgggaacctgggaggcggagcttgcagtgagccgagatcgcaccactgcactccagcctgggcgacacagcaagactccatctcaattaaaaaaaaaaaaaaagaagaagaagaatgggtgtactaatggtagttactgcatcgggttcttatgagtacgaaatgaaaaaatggggcaaagggcttggcacatggtcagtatcaatagatcactagatggtggctgaggctcacatcaggacttccaatgctgcttttttaaaattattattgtttttgagacagagtcttgctgtgtcgcccaggctggagtgcagtggcgcgatctcggctcactgcaagctccgtctcccgggttcacaccatcctccggcctcaggcctccccagtgactgggactacaggtgcctgccaccacgcccagttaattttttgtatttttagcagagacggggtttcaccgtgttagccaggatggtctcaatctcctgacctcgtgatccacccgccttagcctcccaaagtgctgggattacaggtgtgagccaccactcttggcccccaagctgcattttaataatctgtttctgttccccccgctggactggggtgctctaaggacagctgttgccccacgtttgttgttctggtgcctgcactcagtttgatttcatttacatatgtgtttttgaaaacctcggaggagaattggcctgaccttcattagtcatctggaccaacgatgattcacgtagctgaagagaaaggtgaggtccagagaggagcaggtgcctgccccaggtcacacagcactgggtggctgaccaggctgcctttccctaatccgctcagactgagaggactcatggtcaagagaagaccatacagtcaggcgcggtggctcacacttgtaatcccagcactttgggaggccaagggggttgatcacctgatgtcaggagttcaagatcagctggccaacatggtgaaactctgtctctactaaaaatacaaaaattagctgggcatggtggtgagcgtctgtgatcccagctactcgagaggctgaggcaggagaatcacttgaacccgggaggcagaggtttcagtgagccgagatcgcgccactggactccagcctgggagacagagtgagactcaaaaaaaaaaggatgggtgcggtggtttacgcctttaatcccagcactttgggaggctgaggcaggtggatcacaagatcaggagtttgagaccagcctggccaacatggtgaaaccccatctctactaaaaatacaaaaattaatcgggtgtggtggtgcacgcctgtaatcccagctactcaggaggctaaggaaggagaattgcttgaacccgggaggcagatgttgcagtgagccgagatcatgccactgcactccagcctgggtgacggagtaagattccatctcaaaaaaaaaaaaaaaaaaaaagaggactatggccaggcacagtgactcacactgtaatcctagcacttagggagactgaggctgcagtgagccatgatggtgccactgcactccggcctgggtgacaaagtgataccctgtctcaaaaaattaaaaagtaagagagaaccatgacaaccatttcctgccccattctgcatccttttaggggagctgagaattggagcagagtcccagcatgggctgtggttcatctgccaagaaggctgagtcaccacccagagtgccccatgacactgcatccagcctcaggttatctccaaacagcctgacatttgtgtttacttctaggcccctttgtctgcagagtcagtcatttggggtctggccttctgcagggaaatgaagatgagcttggctcagagcccaaactcagggccgggggacagggggatgcacactcgccggggggcctttgacacagctctgtggctcctcccgacaacctgggtaggatgttatgatcagccccatttgacagatgagggatctgaggcacaaaaagggagagttggccgggcgcagtggctcatgcctgaaatcccagcactttgggaggccaaggcgggtggatcacctgcagtcaggagttcgagaccagcctggccaacatggtgaaaccccatctctgattaaaaaaaaaaaaaaaaaaaaggctgggcgcagtggctcacgcctgtaatcccagcactttgggaagctgaggtgggcggatcatgaggttgggagatcaagaccatcctggccaacatggtgaaaccttgtctgtactaaaatacaaaaaattagctgggcgtggtggcacacgcctgtagtcccagctactcaggaggctgaggcagaagaatcgcttgaaccccacaggcagaggttgcagtgagccaagatcacgccactgcactccagcctgttcacagagcaagactccatctaaaaaaaaaaaaaaaaaaaaaaaaaacacacaaaaattagctgggtgtggtggtgggcgtctgtaatcccagccagctacttgggagtttgaggcaggagaatcacttgaacctgggaggcagaggttgcagtgagccgagatcacgccactgcactccagcctgagggacagagtgagactctgtctcaaaaaaaaaaaaaaaaagggggagggtcaccggactcagtggctcacgcctgtaatcccagcactttgggaggccgaggcgggcagatcacgaggtcaggagatcgagaccacagtgaaaccccgtctctactaaaaatacaaaaaattagccgtgcgtggtggcaggcgcctgtaatcccagctactcgggaggctgaggcaggagaaaggcgtgaacccgggaggcggagcttgcagtgagccaagatcgcgccactgcactccagcctgggcgacagagcgatcctccgtctcaaaaaaaaaaaaaaaaagggagggtcacaaaactgggttgcagtggaacaaggatttaaactcaggcagtctgggtctcaggctgccctcttacctgactgctcgttctgaagggcattattcctggcaggagatggccccagaaggacacacgaaatccccctggagctggcctttagctctgtttgagtggaaacaaatgttctagaaacatatcagtttctctgctcttgggggagtttattttcccatttagtttctcagggaaagttcttttggaaaaactccagcctcatcttggctgaaccaggaacagaatttatattcacaggaagagcactggtttactgttagacagatctgggactctgtcacctgctgtgtgactttgggcaagtcactcaacctctctgagcctcagctatctcatctgtaaaatggaaaaattgtaatttcaactctatagggtaactgggaggttgaaacgtagaaaataatttctgtaaagacttttgcacagtacatggcattcagccaatgaaagcctcattttcacttgccctctttggcagcaatgctctggagagggggtctgaactggagggttgctccgtatctccatcttcccttctctctggtctctcgggctgctgggcattgtacagctcctccaagcccacgccctggcagggcccagagagggaaaggccctgtaccagctcacacagtaggtcaatagcaatacagagcctggacacaggactcctgccttcccactggaaggctccagatcatactgattcaaattctggctcagactttgattggtgtgtgtccttgagtgagtgatttaacctctttgagcctcgattttcttgtctacaaagtggggtaataatagcaccagccttgaagagcagttgcaggaattaaataaaacaagagactgtggagctttgaggggtgggcgatccttagggaagaagagaggatgaaagtgaatggtgggcttggcccagctcggctgggtctctccttcccccactccctcttccctcaacacccaattccacagccttgtctaggaggggcaggctctcgcccagcgcccagcgcctactcagtgcttcccacatcccacctcaattctcatttcatcctcaaaagagcccttggaggagagagtcttttttttctctctccctctcttttttttgagactgggtcttgctctgtcgcccaggctgtagtgcagtagcttgattaccactcactgcagccttgacctcctgggctcaagcagtcctcccaccttagcctcctgagtagctgggaccacaggcatgcaccactacacccagctaattttttttttaagacagtgtctaactttgtcccccaggctgcactgcagaggcgtgatctccgctctctgcagcctcgacctcctgggttcaagcaatcctgctgcctcagatgcccaagtagctgggactacaggtgcgccaccgccatgcctagctaatttttgtaatttttatagacacaagctttcaccatgttgccccagctggtcttaagctcctgggcttaaaagatcctcctgccttggcctcccaaagtgctgggattattggcgtaagccaccttgcctgttggaggaggaattcttgtgatccccatttcccagataaggaaactgaggctgcaatgggcgacaggggagaagcctgttctctctgccttgtggaagctgcctgtctcctgcccctgcctgagctcttgccctgaggccaactcgctgcctcctcttggtcctgtctttgctgtggctcttctgcctcccttctgctctctggtctctctgccacctgagagcccatcatggggaggctgccctcgaccctggcccagaatcatcagtgggttcttcccccatccctgcagcccacttagcatgaggccctggagccgcacagtcacttgggtgggaggtctggctggccagagcaggccccagctcagccgcgtctccctggtaaccaccatgagctgcatctccccctctccatcctcctcttccctccctgcccctccatggcctcccagcactggctgtcactgccaagcacaataccaggcctgggaaaactgcagttgggaggccaggaccgccctgctccctagagagagggaggcagggcctctgtccccatcgcctgccaaccctcacccaggtggggcaggtggcactcaaggagtgcactgcagggcgtctggtgcttcccagctgtgtcatcttgggtaactttgctgccccgtcttcttttttttggtaacagctttactgagatatcgttcatataccataaaattcacctgcttaaggcgttcagttcagttgtttttagtacattcacagagttgtgcagccatcaccacagccaattatagaacatttccattccccaaaaagaaacgttctacccattggcagccctcccctctccctccttcccagccctggtgaccaccagtggactccctgtctatgaggatttgcctcagagatggaatcatgccctctgtgtttttgggactggcttcttctctgtgaccttgcaaacattctcgcataatgtgtgcagggttcatctagggtgtagcgtgaatcagtatttcttcttttctttttcttatggccaagtgctagtctaccatgtgtctagaccataatttattatccattcatctgctgatgggctcgggctgttttcacttgttggctgttgtgaatgagcactggtgtgaccattcatgaacatttatgtccaagtgtttgtgtggttgcttttttttttttttttttttttgacagagtctgggtcagtcacccaccctggagtgcaatggtgtggtcttggcttgctgcaacctctgcctcccgggttgaagcaattctcatgcctcagccttctgagtagctgggactacaggtggatgccatcacacccgattaatttttgtatttttaggagagacggggtttcaccatgttggccaggctggtctcgaactcctgacctcaagtgatctgcccaccttggcctcccaaagtgctgggattacaggtgtgcgccaccacacccggctgtttgtgtggttgcttcttgaagcttccgtattcttctctctaaaatgaggataatgggtgaaaaggccaaacctggtttgccctgccaacctggcatgagcttagacagaaaagccccacttcagccttttcagggttgagggtctgtgaggcaagccaagcccggggctccagtgccttcctgactggagggggagggttttgggaggagggaggatactactccacctccacccctaggcatggcagagccagctcagcatcttggttcagaaaaattccacttgctgtataatcttgagcagaggccagaagacctgctccagtggactcctggactcatccaggcctgccatgcagggtgttcaggctttctgagctctggactccaaggaaccttacaggaaccttgtgggtgattttccttccctgggaactccaagctctggggtgggaggggtataaattggaggccacaggcctgtaaccccagcattttgggaggccgagggaggtagatcaactgaggtcaggagttcgagatcagcctggccaacatggtgaaaccccgtctctactaaaaatacacaaattagccaggcgtgttggcaggcacctgtaatcccagctacttgggaggttgaggcaggagaatcacttgaacctgggaggcagaagtgacagtgagccgagatcacaccactgtactccagcctgggtgacagagtgagactctgtctcaaaaaaaaaaaaaaaaaaattagctaggtgtgagggtgcatgcttgtaaattccagctacttgggaggctgaggtgggaggatcgcttcagcccaggagatggaggctgcagtgagtcatgaccatgtcagtgttccccagactggatgagaccatgtctcaaaaaaaaaaaaaaaaacaaaggatcaatgctagccccattttacagaacagaaaataagagtcagaagttaagagtgttgaccaatgcgctggacgagttggctcatgcctgtaatcccagcactttgggagaccaaggtgggcagatcacctgaggtcaggagttcgagacctgcctggccaacatggtgagaccccatctctactaaaaatacaaaaaatcagccaggtgtggtggcaggcgcctgtaatcccagctactcaggaggctgaggcaggagaatcgcttatacccaggaggcagaggctgcagtgagccgagatcgtgccaatgcactccagcctgggcaacaagagtgagactctgtctaaaacaaaaaaaaaaatttgaccagagccaaggctatgtagccagaaggtggaggatgcaggattcaaacccaggcctgggtgtggagcccatactcccacctgccatgttggagctgatgtgtggcttggcttgcttgaagtcaccaagttgtaggtgacaaagctaaggtttgaacccagatgtgtgactctgaaacaactgacccttatgccgaaccatattctagaccatcactggccaccctacccagccacctcccaggcccctggagttaagagaattgaactgcaaactggaaggacttaggggtcatatgacccctagttttgtttttctggtgaggactctgaaccacgatggggtcgtttgtgacttgaagtaacgccgtgaggatagcaggtgggaccagccctcctcactgtggccagggttcaggagctgctcccctggactaggctcacctgtgcctctttcttcctcttccagacggagcccgtggctggtgaggccgcagagcagggccaggccgggccctgcccgcaaggacgaccaaacccctcaccggcccctgggccccagagcccaccaggctctcctgctggccccaccatgacttcagagtcgacgtcacccccagttgtgcccccgctccactcccccaagtccccagtctggcccaccttccccttccacagggagggcagcagggtctgggagcggggtggtgtcccacctcgggacctacccagccctctgcccaccaagcggaccaggacctattcagcgtgagtacctgccccttgcccaggcccctgacccttgtcaggacaggggctgaccatccccatcctcttccaactcctgttgtcctcacctgggacaggggaactgtgtgtggaccttccagtaactggatggatgtttgtcccatacatccattcatccatccacccatccacccatccatccatccatccatccatccatccacccacccacccacccacccacccacccacccacccacccacccatccatccatccatccatccatccatccatccatccatccatccacctgtccatccatccatccatccatccacccacccatccatccgtccatccatccgtctgtccgtccatccatccacccatccattcatctatccatctattccacaaagatttactgagctcctgaccagtcaggatccataagctgcttacaatccagagggaacttgttcaccatccattaccacccagcagggttaggggtgaggacccagcatggggtaccagaggagatgatgtcctggttgggtatggaagatgtatcaggtgaagaagggagctggcgattctgggcagatggtacagcatgggcaaaacccaagacacggagttaacctttggagaggggtaggtaggcgggacaaagactaggcctgggcctttggggtaggtcaccgatgaggtggcataggggagtaatacgggtccatatgggggaggccaaaggatcttttgggaaggacagggtctcgctctgttgcccaggctggagtgcagtggtgcagtcatggctcactgcagcctcaacttcctggccttcagcaatcctcccacctcagcctcctgagtagctgggacgactggtgcgtgccaccacccccagctcatttttttaaaaaaatgtttgggccagacatggtggctcatgcctgtaatcccagcactttgggaggtcgagacaggtggatcagttaaggacaggagatcaagccagtatggccaacatggccaaacactgcaaaaccctgtctctactaaaaatgccaaaacttagctgggtgtggtggtgggtgcctgtaatcccagctactcaggaggctgaggcatgagaattgcttgaacctgggaggtgtaggttgcagtgagctgagattgcacccctgcactccagcctgggtgacagagaaagaccctgtctcaaaaaaaaaaaaaaattttttttgtagagatgggagtctccctatgttgtccaggctggtctcaaactcctaggcccaagtgatcctcccgcctcagcctcccaaagtgctgggattacaggtgtgagccaccgtgcctggcctcattatcgttgaatggggatgactgtgtggtttctggcctgggtcaagtttctcacagccctgaggcacgctcagcagaaagggcccagaatggctgtagggatccggggaggagttcctcaggccacagctccaatcccactaccctatctccaggacagcccgggcctcagctggccccgtgttcaagggcgtctgtaagcagttctcacgctcacagggccatggcttcatcacccccgagaacgggtccgaggacatcttcgtacatgtgtctgagtgagtcccctccacctccctgttcttggcccctgccctagtgtccccaatggtgcctcaaaaatggctctccaggcctctcctctcactggctgaggtctgtattcatggtgccttttctgtcctctgagtaggggctgagggtgcgttgggagaggagggctggggccagggagggagtgggcacgcagaccccagaagcctgggagccagcggctgggccctggatcctgttacagcatcgtggaggtctgagagggctaggccagctcctgagcctcttggcctggaaagggccttcatgtgggtgggccaggaggtagagatggatatcatgtctaggcctggccccacccacttctaatgccaggaggaccgggggaggtcactgagcttctcagagctttagggacctccccgtgccctttcacatctcggtccccaagggacccagaaagggaggtacagtttatgagtcccattttattttattttatttattttttgagagggagtctcgctctgtcgcccaggctggagtgcaatggcacaatctcggctcagtgcaacctccacttcctgggttcaagcgattctcccacctcagcctcccaagtagctggaattacaggtgccagccaccatgcctggctaatttttgtacttttagtagagccagggtttcgccatgttggccaggttggtgtcaaactcctgactcaggtgatccgcccgcctcagactcccaaagtgctgggattacaggcgtgagccactgtgcccagccatgagtcccgttttacagattcgagagctgaggttctgagaagcaaggcctggccaggcctcctggcctagggaggcttagggccaggctgcccccaaggccaggccacaggattgtctggggcacagggcctgctgctgggctaatacccctcttcctgcccgccagcatcgagggggagtacgtgccagtggagggcgacgaggtgacctacaagatgtgccctatccctcccaagaaccagaagttccaggccgtggaggtggtgctcactcagctggccccccacactccccacgagacgtggtctggccaggtcgtgggctcctaggctgagtggttcacaggccagctggccgggggttggggagccacacagggtgaacgggcagcagccggctccatgccccactgccctggctgatgagtccttcggtggcctcagtgtgcacgtctgtctgtccgtctgtgcttgtggctatgagcgtgtgcctccacccaccccacgacccgtgactactgtgcaagctggccaggaggtaggtggagggcaaggccaccagacctggcttcgcgctgtccactgcctctctcctcccctccctgccgcagacacgcaggacccgctcgccctcctgcttacccgtccccacggtgactgagctgcgagagcctgcgctgggctcactccctggcctccgcccctgagctgtcccgtgtcagtccctggcccggagccaggctctctgtgctacttacatctccctcccttggctgaggtcccccgccacagcctggacccttccctcagaagcctggccgatgggtgcttttggggagcctctcagcctctggcaggggaggaggactgacacggaggcacacaggcctctcactgccgaggccagccttccttcctgctctgctctctcagtgccatggagaggcaggaagaggggcctgagggcggaaggggtttggggctcccatttcgccggccagtccctcctcctcagcctggcagtggcgctgggctccttcccctgggctgtactgagccgagcccaggggtttgcagagggtgggggtccatctctccagcttggctgcagacctcctttaccctgactcacaagccccactgatgctctgggccatgcccggctgacggctgctgtggatgccgcgagggacggacacacgtccggggcacccacgaggagggcccccagcctgggagactggccctgcggcctccacgtcaaactctcttcccaaagccctaacagaccagtggccgaggtgtggctcttattgcatccatccctgaagatgtgtggctgttgctgtcacctggagtccttttggggccaagatgtgtgtgcacccggggtcgtggccattcactcccaggcaggggtgagggtggcctggcccaggaggccaggaaggagggccctgtctgcctccacctctgggtgcaccccctgcctaccaccctcccttctagagagcacatcgcctgaccggggagaagtggggccgtggttcgagggagggctggccaggggtgggacccttatgagactcagtctgtgagtaaaactgggggctcaaatgcccaggatgaggggatcagtgactgtctaggaggatcccttgccttgtaggtgccccaagaccgcagggtagaaatcagccgggatgcctgcatcccacccccggccccagggcccaccacataaaatctgggagcccagagctgctgaggtgtggtcagctcccctaaaatgggcacggcccagcctgtcccatgaggaataaaggcccctggcccccttgagagagggcttgttggtgagggctgactcctgggggcccccaaggctcccctcctgtggggaggccaccttttaaggcaccactagcagtcaggatatggtggcatcagccctggggcctcctgggtggcaggggggcagcagctctcctccccactcacaggccctgcagtgctcatttggaattcctcccaagacccctggccacccagaccccccattcttcctaacactggcaataaaccctcaactgtgacccaccgtggcctgaagctgcctctgtgtcagggtccccaaggaaggggctgggggtggacacaccaaaccagctcttctttggggattcaatggccccctcctcgactgcatcagacttcctttgtgacctgggccaagtccctgccctctctgtgctgtttacttgtcggcaaagtagtggctgtgacagcatgtgactggggccaattatccattcagacacagctgacacctactttgttctgggaactttaatactgtgacaaagttctctaaaataggcaccttccccaccgtacctcatcgcccagggcaggcaggcagggcaggctagatctcgtaccgatacttgagcacgcctcctcctggtgcagaaagaaacctcttctgtaccgaaatacaagcagcagctgtggcctgggccaccaggtggagcatggggaacactctgggccctgggaggacgaagccagtgccactaggagcagactggctggggacggttgtccacacagactctggccccatctgggtgggcttgcagcaggcgtcctgggccagaggaggggccctggcatctatccaacaccaggacctctctttaggcctaggccaaactcttcagaagtcacgacacacagatgtgggccccggtcacgcctcatgagctgtctctgggaagaaaatctcccggcatcgctgcaccgtgtcctgaggagacaccacgctgtggccaacagtccgggggtcggcaaagatctcaaagtcgttcccaccctgcacacagaggatgggcagaggagggatatttaggtggagtccctctccacattggctgctacggacctgcccctcctcctgccccttcagaactgccaggaagcccaccttctcaccccttgtcagacctgccctgacttgctgtgtgatgtagaacaagtgcccagcctcttggggccccagctttccaatctgtgtaacggggctggtgagcaatggttgttctccaggagccccctaagaggtctgttgtgttgccccatgttctggccttgacctcaggtgatttgcattggagaagccaccagacctggcttctcactgtccactgcgttaggggaaacctggggtgggccacactcacagggctagtctcgttcccaaagaagtggatggtgtcgaagctgtcctggtccaggctatccaggcagtagcgcttgtcccagccctcggggaagacgtcaaagctgatcatgcctcctgtgggcaggggtggggactgttattccctgctgggaggggcagacaaggctaacagaagggctgcttgttcattcattcattcaacaacccttgagtgcctactgagggccaggaataggacacgggacagacttaggatcctcaaggaagttatgacacaggttggagaatgaacaagaccatgaagtgggtgggggaagctcatccggccagggtgatcaggggagacctctgaggaggtggcaatgagctgggacctgagccgagtggggatggctggggcgcaaagtacagcccctgaggcagggaagagaacgagcgtcccagcaacggaggaggccaggagaggtagggggaggacgggcaggccctgggcatcacatggagagggaggaagagcctggggaggactttgggcagaggcatgtcatgactccagctccagcctctctggccactggggaatgggtgaggtggcagaggggagcccagttgtgtcagggtcagttggagcctgggacaagctgctggcagtggaagtgtgagcaccggtgggattccagacagggggccctgtgacttctaggagtttggacttgggaaggggtgggggagagcattcaagggagaggctctggttttttggcctgagaaactgggtgggcatggggcgtttacctctgaggtatgaggtggggaaaactgggggccagtaaacactgaacccctttctgcatcgg

SEQ ID NO: 5 - DNA, 58404 bp, Homo sapiens
tcctcttctgtgaagggtttcgtgtcttttcatcttctctttcatgagactgtgtcttacttttgctctgtgttgtggagaacctccagcttggtttccatctggcttccctgaggtggaggagagaagcgttcgggctcagcttgcttgtttggccacaggtaaacagacatctgtagaatggaggtgacacgaagctcctgggtctggtgcagaagaggtcagggccccagtggcctgtaccccctaagctcaagggtgtgtctgcagggagtcctagatcaggactgaccactggggccttggctggggtcctacctgcccttgagtcgtcacgtcacaacccacacactgggtgccatgggcatgaggactggccaggaaaaggcctgtggggcctggcccctatcagggacacttgggcgaacaaggccaccccactcccaataaggtgtttggtgcagtgccccgagcagtggggccgctcggctgcccccgtggggacggtctgtcccagggtggacagctgctcttcctgaggggcctgcctggatgccacaggctgtgctgctggaacccagggattccacagcaccatcgtcctgatcacaaattctcaaggaaaccaaggagctcctgcctcaccttaaaacatttgggatttaatcttggagtgaaaattgttatgaccccactgaattttagagtttacacaaaaggccaaagtgaaggcagagactcaggcctctcaactcccacccgcaggggccttttcttgcaaccttaaagggcatctgcttcacgccggcctcggcagggccctcacactggcaggactacttgcacaccgggcctgacactcactaggggaggctccccagcccggctgcaccacccacctctacctagtcgcgtgtcccggccagtgccctttccactcccacccagtgcccccgcagggccccctctgtcctcttagggacctccactcccggaccaatagcctcctgcctcagggccccccactcatgggccaatcgccccctgcctcaggcctccccccactcgtgggccaatcgccccctgcctcaggcccccaccaactcgtgggccaatcgccccctgcctcagggccccccattcctgggccaatggccttctgcctcagggactcccactctcagctggtcccccccgcctcagggacccccactcctggccgttcccccgtcagggcccccgactggcggctgctcccccatcctgcctcggggccccccactcccgggccaatgtccttctgcctcaggtacccccactcccggcccgtccccccgcctgtgggccccccactccaggccggtggtagcccctgcctcagagccgcccactcctgggccatctcctgcctcagcgaccccactcctgggccaatgcccttctgcctcagggacccccactcccagccggtacccccctgcttcaaagcccccgactcccggctgctccccacctgcctcggggccccccactcctaggcctacgtccccctgcctcagggcccctcattctccatcctcctgaccccctcagggaccttctggcccggtcctccctaactcaagggcccccactctccatcctcccgaccccccactcccagcccggtccccgccgcctcagggccccctttggcccccgctcctcgcggcgccccctcccccgcgcgcggccgaggcagcggagtccgcgcgtcatggcggcggcgggcggggcgcgtctcgcacgcagcgcgccgggcggagcgctcgccgcattgtttgcttcgctggggagcgagcgagcgacccggccctggagtccgagccagccccgcgtcccgcgcccgccgcccgccgcccgctcccgcgcccgcgcccgcgcccgccggccgggccccccgagccgggcctccagctgggccccgagcccgagcccgcgccgcgcgagccgctgcccgagagtccgcggccgccgctgccgggcccggagccgccgcggccgagaggggcccgcgcccaggagcggcggcggggcccggcctgcgcggccgttggcggaggagccgcgggcgccattagcaccgcctcggccgcgccggcccccgcgcccgcccgcttgccgggctcccgcggccgcggcgccccgaaggtgagtgggcgggggcctggccggggaggcctccccgccgcctcgcgggccgcccggccgccgccgccgcctcggcccggcctctcggggttgtggtgccgacgccatgtttggcggcggcggcggcggcggcggctccgcattgtctgcgggccgggagcccgggatgccggggaggccgggcggggagaccggggaggtcgggccgggcggccggggagacgggcgggaagacggggaggccgggcggggagaccgggtaggtcaggccggggagtcgagggaggccgagtcgggctgtgggtctcggcggcctgggccgcgggcgcctgcccggagtccgcgctcgagtcgggtcgggcctcgggcagccgccgagccggccgggccgccccttatgtaacagacaggcccgccgagctctgccaagacgggaactccctgtgagcagggacgcgccccgagatcgcccaggagccgcgcggcctgcggcggccgggcttgggaaccggcaccgcggcctccccgggcgtttgcagggagacgcctcgcgacgaacgcgaggcttccccgggccttttaaaacgagtgacacgattgaggcgcagttcacgggaaacgcggctcttgtgagcggacgcgggagttctgagaatccgtagcagcgggaccccctgccccgcggggtgcggccccgtctccccagaaagcgcggccgcccgtgtctgtttttgagggtctgtcgccaggtggttgtgtagttagtggaatcggcggatgtttttgtttggccggcccagcgccgtcccgagtgctgtgtgctgcacacaacttcgcacagctcagcggccgcggcccctgtggccttgaccgagaggcccggcgcgtggccggcttctccctgggcgggcggtgggaagatggaagcggccgtcttgtgggcagccttccccgcctgtggcccgcagggctcttcgatgtacttaagggaattattccttgagaagctacgtgtgtgcccccgcggatccctcccagtggaaatgcttgtcccagtggaagggccagggacagaaccggcccaggggggaagcggtgaagcagaggaggtcgtgggtcgccctgccctgctgagggcctactttccccgggtcccagttgcatgttgagggtatggagctgctgtggccgtgaagccttcggttcagttctccccttgtagaaagtgttgcgatgaagagcttcacggctccctgggagagagtgggtttccaggggctgcttgtcgttagggcgactcaggactttgctgtcgaggggaaaatgacaggttcgtttctgatctggtgagtaaccaactgttgcttctgccccacctcagtaatgacgcgtgtcggcgtcccgggtgcactagggtcgctctctgcaggctgtggtgtcacctctgcagggctcacggggccggctggggggtggctgtgctgacagctccccaggaatccagggttgagtgggtacctggaggccctggagatgcagggggtctgaggtttggccgaccacattttctctcctattcctttctgtaggtaattgcaatctagtttcaacatacaatgaggatttctgtctgatacagagaaagatacccagtgtctggagggtctgtcttaagaagtgctcttgaagtctgctgggatttcctttcgggactcacagagggaagcctgctccctgagggctttttctcaggcccaatagatcagggtaaggctgctgtgggtgcccctgatccccctgggccccgaggccaggcgtccctgacgtggcagggctagatgcagagtatgccttgggcttcagctgagaatatttgttttgcgagtcagtcactgaaaaatcattttgcttcctgtcagtgaagtgtggcgctttggagggaggcactgcccagcaggcggtggtcttcacaggaggtgtccacacaccaggcaccctggggacagctaggaatagacgcagtccgtggtgttgggacagcagaggcctctgccacgaggagctggaggtatgggaggcagctcactggttttgcctacctctggaaaagcagattctcctaagcctctgtggccaagtcttcaggcacctgagccagcgctggcgaccctcctggtgagggtctctgcaagcagcgaggggttcctgggggtcacccctcgctgtggagcctgagtggagcgtctgccttcacgtgtgccggggagaacagagattccctttggcgtcatgcatgtgtctggattctctcagaaaggaggaggacgtggaaggaggaggacgtggccagcaccatggtctcagtggggcttgaggagtgcccctgaggggaaggggcaggttggctcagcctgtggtggtttccatggtggtcactgccaaggctctgcagaagcggggttggggcctcccaggggccaagactgtcccctcagaccagtacagggctcccctgttggtcccctgtgccgtgttgtgcgtgtggagggcctgtctatagaggatggacaggctgtgatctgtctcctacccctggccccagcaggaatgctgcaaggactgtggtgactctgggctcatgggagtgctctcctgggagtagtggggaggggaagagtggtttagggggagcatccgataggaccaggtagccactgagcatgcctgtctggtgggcatagcctctgtgcctggtggggtccagccctgtatgtggacttcctgggggaccgcctgcatgctgggaaagtcctgcaactgtgggctctgggccggacccctcctccttggggagcgttgctgtggtctccgcagcctgttggtgtggtctgagaggggactggtgtgtggtggtagggacgcaggtgctcaggagggctcctcaggctgcctctctgcctgttactgctgctccctccctggtcctggggactcgctcaggcctggatgtgtggttttggacaccttggaaagaggttagctgtgagttttgctttgattgggctttgagctgctgagctagatctgtccaagcatgcttttgtggttttctcgagtctttggtcaccctgcgtagaattacctttacttttgccttcattttaggtaatcattaccaaatgaggaggaaaggacgatgtcatcgaggctctgcagcgaggcatccttcttccccatgcagtgttaaacactcccctacgcgagaaacgctgacctacgctcaagctcaaaggatggtagagatagaaattgaagggcgcttgcacaggatcagtatttttgatcccctggagatcatattggaagatgacctcactgctcaagagatgagtgagtgcaacagcaacaaggaaaacagcgagcggcctcctgtctgcttaagaactaagcgtcacaaaaacaacagagtcaaaaagaaaaacgaggccctccccagcgcccacggcacgccggcctcggccagtgccctcccggagcccaaggtgcgcatcgtggagtacagccctccgtccgcccccaggaggcctcctgtgtactacaagttcatcgagaagtcggccgaggaactggacaacgaggtggagtatgacatggacgaggaggactatgcctggctggagatcgtcaatgagaagcgcaagggcgactgcgtccccgccgtgtcgcagagcatgtttgagttcctgatggaccgcttcgagaaggagtcgcactgcgagaaccagaagcagggcgagcagcagtctctgatcgacgaggacgccgtgtgctgcatctgcatggacggggagtgtcagaacagcaacgtgatcctcttctgcgacatgtgcaacctggccgtgcaccaggagtgctacggggtgccctacatccccgagggccagtggctctgccgccactgcctgcagtcgcgggcccggcccgccgactgtgtgctgtgccccaacaagggtggtgccttcaaaaagacagatgacgaccgctggggtcacgtggtgtgtgccctgtggatcccagaggtcggctttgccaacacggtgttcatcgagcccatcgatggggtgaggaacatccctccagcccggtggaaactgacatgctacctctgtaagcagaagggcgtgggtgcctgcatccagtgccacaaagcaaactgctacacagcattccatgtgacgtgtgcccagaaggctggcctgtacatgaaaatggagcccgtgaaggaactgactggcggtggcaccaccttctccgtcagaaagaccgcttactgtgatgtccacacgcctccaggctgcacccggaggcctctgaatatttacggggatgtcgaaatgaaaaatggcgtctgtcgaaaagagagctcggttaaaacggtcaggtccacatccaaggtcaggaagaaggcaaaaaaggctaagaaagctctggctgagccctgcgcggtcctgccgaccgtgtgcgctccttatattcccccgcagaggtaagcgtgtccaagcattgagtccacaaggagcctgcagtgtgggaccctgggaggacgtgggcacagcctgcagggcccgtgctgtgtggtcattgcgtttctagttggcgcagcttcctaatattcccctgaagtgtggttctgcttgtttaccacgtctttttggggaatagatgttgtaaaagattttagtctgtaggcttggaataatctgtagttttctatgtttttttttttggagacggagttttactctgtcgcccaggctggagtatagtggcgcaatctcagctcactgcaacccccgcctcctgggttcaagcaattctcctgcctcagactcctgagtagctgggactgcaggcgtgcgccaccatgcccgacaaatttttgtattttttaagtagagacggggtttcaccatgttggctaggctggtctcaaacgcctgacctcaagtgatctgcccgccttggcttcccaaagtgctggaattacagcacttgctcagccttttttttttttaaatagggttttgctctgttgcccaggctggagtgtagtggcacgatttcagctctctgcaacctctgctgccaggttccagcaattcttgtgtctcagcctcctgagtagctgggactacaggcgtgtgctcccatgcccagctaattttgtatttttagtagaggcggggtttcaccatgttgcccagggtggtctggaactcctgagctcaggcagtctgcctgcctctgcatcccaaagtgctaggactataggcgtgagccaccatgcccagccgtgcgtgaagatttttaagaatttcagtgactaaactttaagaaggaatgaagcccacgcaggaactctgtatgactttcaacccgaggggctctggcctgggcttcccagtgactgccggcatcgggacatccactgctgtggccttggccccgtttcccgtgctgtgccccccacttgctgcagatgccctgaggaaagggtggccaaacaaggggaggagctgtgagcacagatggggcctgccggtcaacagggcgggtagagccagcctggtgctgagcttgcagcttggctgggggagacgcctagagccccagtaccacacagaccctccaggactgccgggggtcagtgagcaggaccctctgaggtgtcagacctgccccacatgtgaggggaggacagcacaggtgggacgcatgcaggctgagctgcatcgggcggtgaggctgggaggttgcagtgagctaagattgtgctactgtaccgcagcctgcgtgacagagtgaaactgtgtctcaaaaaaaaaaaaagaagttttaagtgatttttgttaatattactctactttaccaaagtgaagtccagtttcttttcacagagctgtaaatactcagataattagtcaattcagacagaatgaacaaaaaatgctcataatccttcccatccagggaaaaccctgtcaaaaccaaggtgtttgtctttgtaaattaatctgactttgaagagatggttttgcttggatttctacctatgagtcaaaaagtctagggtttgtattaagagcttctgtataagaggtctaaaaatttcagctttactgaaattgaagcaaaataaacaaaatgtgatctaacaaaatgaagagccaaaagtctgaagtgctcccttccctggccagtaccagatgatgacctgctctgggagaggccgggcctggccgggccgcacgctctctgttctttggctcctgatgttgggtaggcaggactgaaggaggcagtgtttgcatgcaggacatgggggctgaagtggccagggctgattgagaagaaaactcgacctaaatatttgaaagcatgtattggagctaaaccgcgtactgtgtggttctgttcttttcctaacttgggaataaactattatttcagcttcgagtagagagagagaaacaaacctggacgagtgttcctggccgcggtctctgcagtctgggtttcccagtctccaggagatgctggtgcttcaggccaccttgccaccagtggaggagctcccagtgcgcctggcctgttggcaccatggtgctggacccacctctggggtggttgtgaggggcaggctctcaatacagtactgactgctgcctgaaaccgggtttactgccttgctgtggtctgagaggcagctgatctggcagccctgttcttaggccctgggcactacccctgggtgcatgtaggaggcctcagctgtgcatttgaattctgtgtagatgagggtgaagcttcttattttttattttatgtttagagacagggtcttgttctgttgcccacgttggagtgcagtggcgtgatcatggcttacagtagcctcaaactcttggactcaagcgatcttcccgcctcagcctcctcccagcctcagctgggaatacaggcacgagccactgtgcctggcccatggtgaagcttcttgatgtgcagccgtgggcggggatgctgagtctagttggttatggtgtgcactaaccaatggctccggtgtaggacccacctagagcatctgaggatgttatgcttcaggccagccagtcacgctggaagggagatgagaccccatctgagcagcgttttagagattttagagaaagaggatcttccttattccctgtggacagaacagaatctgccttcagggacggactgcttttataattctagtggtttaaaaaattaaaatttcaagtaaaaaagatagttcttttttttccccccttttttttgaggtggagtcttgctttgttgcccaggctgcagtgcagtgcggtgatcttggctcactgcaacctccacctcctgggttcaagtgattctcctgcctcagcctcctgagtagctaggattacaggcacctgccaccacacccggccgatttttgtatttttagtagagacggggtttcaccatgttggccaggctggtcttgaactgctgacctcaggtgatccacccgcctcgaactcccaaagtgctgggattacaggcgtgagccactgcgccaggctaaaagagatagttttaaggttataatctgtttttttgtaagtttgatatactatgattaaataataacagcggtaaataaacactttgaaaaacaggcagggctgggtgtgtggctcacacctgtaatgccagcactttgggaggccgaggtgggtagatcacgaggtcaggagttcgagaccagcctggctaacatggtgaaaacccatctgtactaaaaatataaaaattagccaggcgtggtggtgcgcgcctgtaatcccagctattcaggaggctgaggcaggagaatctcctgaacagagtcctgctcttctgctcagacgggtgcagtggcatggttatggctcactacagcctcgacctcctgggctcaagcgactcccccacctcagcctcttgagtagctgggaccacaggcatgtgccaccatgccctgctaatgtttttattttttggtgagatggggtcaagcaatctgcctgcctcggcctcccaaagtgctgagattacaggcgtgagccaccatgcctggccttacattgatttattgttattttttcttttctgttcttcttttttttcctgagatgaagcctcgctctgttgcccaggctggagtgcaatggcataatctcggctcactgcagcctccacctcccaggttcaagcgatcctcgttcctcagcctcccgagtagctgggactacaggtgtgtgccacggtgtctggctaatttttgtattttttttgtagagatggggtttcaccatgttgtccaggatggtctcaaactcgtgacttcaggtgatctgcctgccttggcctcccagagtgctgagattacaggcgtgaaccaccgcacccagccctattttttcttttcacttcctctctccagcatacatcagtttttattaacggattgagttgcacctgtatagaatgacattttttttttgagacggagtcttgctctgtcacctaggctggagcgcagtggcacgatctcggctcactacaagctccacctcccgggttcacgccattctcctgcctcagcctcctgagtagctgggaccacaggcgcccaccaccacacctgctaattttttgtatttttagtagagacggggtttcaccatgttagccaggatggtcttgatttcctgacctcgtgatccatctgcctctgcctcccaaagtgctaggattagaggcgtgagccaccgagcccggccaggaggacattttgtctttagtcttaaaggaaaagggaaagtcttttccatttgcaccagtttgaaattagggctcccttaacatggattactgcaggactcattcacatgagagttcatacatggggtgaaaagacaaacagggtttcctgataactctttttggttattgcatgaaatgagggataaatacacgcataatctgtttaacaaaactcctaggttcatcagaatgcaaagtagaaagtgtcttaaaagagactgtgatcagcaggcagacggcctgtgtcggtttggttcctttgactgcttcagatcttctaggaggagctcctctactacgagagcctggacttcagcctcacggacaagaacctcagataggcaaggctttgtgatgggtgctcctcctaccttcattcgaatgaggttttcctcccgccttcaccctgatagggtgctcctcccgccttcactggtgtcattttattttgagtttaaaaggatgaactggtcttggtcagccttaggaagggaagcatcactcaggtgaaaatacgtggcgaactttaaatacctagatattctcctcatgcatttaaattagagtgacttgagctgttagaaaagttgactgggtgcggtggctcaggctagtaatcctaacactggaaggctgaggtgggtggattgcttgagcccaggaggtcgaggctgcagtgagttgtgatcgcacctttgtattccagcctgggtgacagagtgagaccctgtctctaaggggttttgcatggttatccagagcagtctcttgaattttggttgtctttgacgcagctgcatctggagatcctctatgtgaggcatgtttagagaaagagaaacattgacccctggaattgatattcttccaagaaatcttttagtcttgttggtaaaggcagtcctcagatggtaccggtccctttgttagtggtgagcctacagagatggtgcctggtgtgcagagcgatgtggttggatggaggtgaacagagcagtctagggcccctgggccgcctgctggtcctagcccatcacagcacagtcattcagcagacatgctgcaccagctgattgtttgagcttgggcttggtgcacatgatggagtttgtctggatctcctgtcttggtattccataggaagatgagttggtccagcccatgtcctaatagatgttgttagcaggaagtctgaacttgaactatctcacatgaagaaagttccttctgctgcctctttttatttctctttggcttcatgaacagtcatgcacccccagtgccatccttttgagctccccaaggcctctgccagacacatcacctccaggggtgactccttgacccaccgtgccatcaccactggctctgcaccccttctgagccattcctggagcttgaggcactgtgaggtcaggggaaaagggtcagcgtggcaaggagagatggtcacccaagctggggtcatagagcagcttatggatttcctggaagtcagtgggaactcatttgggaacccccaaaatgagtccctgtggggtgtctgaaatggtggcagaaggggcaggaatggggtccggcagttctcttccctcaggtcctggcggatggatagcaaagtcctgtgtagacaaggtcacccacaggtggtatatgccggctgctaagggccttgggtggcgggccttggcccccgcagtccagagagtgtctgtttactattccctgcagggtaggcaccttgggccccagaattcggaaggcacttttttcctacctggactcacttcctgcagtgttggaggccacctggccctagtctattttatagagacagggtctcactatgttgtccaggctgatcttgaattcctgggcttaagcaatcctcctgcctaggcctcccaaagtgttgagattacaggtgtgagccacctcgcccagccccagccttagtctgtagtctaatgctggagggtagtatgttgactctggaataaagatgtcactattctggaactttttctggggtcactgtcgggaggcgttgtctcccttgagcacttgctgcagccccaggctgttgacctgcacagccgtcctcagagggtggggaagctgttctgtcttgggggcgttgagtccactaggtaggccctgtgaggatcccagctgtcacctagtgggtacctgcagaggttttgttttgttcttttaattgaggcggggtcttgctctgttgcccaggcaggagtgaagtggcgcaatcctaggtcactgcatccttgaactcctgggcccaagtggtcctcagcctcccaaagtgctagggttacggattagagccaccggccgcggccccctttggcttgtgtttttaagtctttttttcctccatgtttctggctgttaattttttataaaagtttgtatctggcatggattgaagcaggagacactggctcagtgcccagtggggagagccctgtgtgggtacctcccgggcggtgtgggtgcatgagttggctgctgcgggtggcaccgggaggccctgtgtgggtgcctcccgggcagtgtgggtgcatgagttggctgctgcgggtggcactgggaggcatggcaggggccatgaggccacaggtggcagctccctgtgcttgacctgcatcgggtctggagtggcgggcactcgggaaggaagcgccaggacgacacattggaaggaggagctgcagggcaggtccagccagtgcctgggagctcgggagggcacctgggtggacgcagcctgcaggagcgcctgctctcctgtatgaggaacagacctgaatgccgtttcagacactgactcattcctgccctcctgtgactttgttggttttctgggttttagtgcagattgtagctggcagctcacaacagagcccttcctggtgcaggctgacaggcaggagggattctcctctacagaaatggacattactatatctggaaacagtttttttttttttcttctttttgagatggagtcttgctgtgtcgcccaggctggagtgcagtggcgtgatctacgctcactgcaacctctgccccctgggttcaagcgattctcctgcctcagcctcccgaatagccggaattacaggtgcacgtcaccacgcccaactaatttttgtgtttttagtggagatggggtttcgtcacgttggccaggctggtctcgaactcctgactgacctaaggtaatccgcctgccttagcctcccaaagtgttgggattacaggcataagccactgtgcctggcctagatttgttttaattgaaaaagctgaagcaaataaaaattgtgctggggaaaactctgagtgctcagagcatgggctgcgtttctcactggcctcaccgcaccttcctctgcactcagactctcctaaagatgctggcatttactgaactaaaggtagcatttcgcagagcagggccgtgggccatgaaccacagtcatctggccatttagacagctctgccctgcccccggcgacttgggtacccaaccatgtcattcccacccctagctttgtggggcaacgttcctctaggccgggttctcttccctgaagcaccccaggcatgtagaagatgttctcagcagaggggagacaccacagtgtagctgatttctgtctctcttcactttcaccatatttacttacttttggtagaagtggggttgaaaatttatgtgaagttttctttactactggggacagcggggcagattactgccacacataatcacctctgctccagcctaggtgctacctgctggaggcgatggtggctttcctgagagcacctcctgggctcgggctggtggggagcttgattttacctttttatgtggaaataacttcaaatttacaaaatattcacaaaaataaagagagcagggactacccaggtgctctacatagagttgcctgttgctggggctgcgtcctcttttgcacaccctgccccgtcggagaggatcccagatgtggcccttgcccatgcacgtcaggcatgtgaaaagagcaggtgtcccctggcgatgggcagcaggctttgtggtgccccagccttggtgcaggagtcccctgaggtgagattcagggctctggccggctggtctcatgtgtttcctgagcgatggatgtgggcacggcgtcctccacctcgcaccacctggcatggggtctgcgtgtgtgtcatgccagggttctgggcctgcaccgggggctcctgccctgcctgtgcactgtttgtcgggggcttgtgcccgtgggtgagtgtatcttttcatttttagtgatgtctttaaaatattcttttttagtttggaaatctttggagagagccccctgttctttcactcaactttagaagttatacgcacctggccagcctcccctctcccattccttccattccattgttttgaagcgagtcctggccatggaattccgttcgtgcacccgtcagtgtgtaaaggttctgaaaagcagcctgaattttctattgtctgatgaaccgaagtttgttcatttcatcgtactcctcaaatttatcaccctttccccatgtggcatgtgcatgctgggtctgcttgaagaaactcgtccccactctgcagccgtaaagctgctccctgtatttcctctaggagtctttacaaattttttttttttttttaaatggagtctcactctgtcacccaggctggagtgcaatggcacagtcttggctcactgcagcctccgcctcctgggctcaagcgattctgcctcagcttcccgagtaactggcattacaggcgcctgccaccacacctggctaatttttgtatttttagtagagatggggtttcgccgtgttggccaggctggtctcgaactcttgacctcaagtgatcgcccacctcggcctctcaaagtgctgggattataggcatgagccattaatggctcctggccaaaaatttttttaataaaaataaaaggctgggtgtggtggctcacgcctgtaatcccagcactttgagaggccaaggggggcggatcacgaggtcaagagattgagatcatcctggccaacatggtgaaaccccgtctctactaaaaatacaaaaattagctggtcgtggtggtgggcacctgtagtcccagctactagggaggctgagaggcaggagaatcgcttgaagccaggaggcagaggttgcagtgagctgagatcatgccactgcactccagcctagcgacagagcgagactccatctcaaaaaaacaaaaaatagagatggcgtctcactgtgttgcctaggttggtcttgaactcctgagctcaaatgatccactcacatcagcctccgaaagtgctgggatcataggggtgagccatggtgcccggccacctcgaggagtcttgagccctcctggaattgctgtttggtgtgaggttgggtcaggcctggtgagtcatctgggttgtgagccagcctgcttggcctcctggtctcaggccagctgtgacctggaccttgggccacccagcagctttgtgctgagcctcagtctgcggttgggagggcaccccttgtctccagaatggtcctggcgtgtgaggtccttggtgcgtccgtgtacagtgggcggcaccttgtctccagaacggtcctggcgtgtgaggtccttggtgcgtctgtgtacatgggcggcaccttgtctccagaatggtcctggcgtgtgaggtccttggttcgtctgtgtacagtgggcagtagctttaaagttcctgcttcaccttgtcagacttctggttagagtcctcccgacattagtgttcctttaggaagcttggactctttacaccgttaattacactgttaatttcacttaaacatggaggtggcccagtttgctgcccatgtaagactacttttacttttttgagacaaggtcttgctctgtcgcccaggctggagttcagtggcatgatctcagttcactgcagcctccacctccagagttcaagtgagtctcatgcctcagcctcctgagtagctgggattataggcatgtgccacgactcctggctctctctaggacttctttaatgtcataatagaagctgatggttttctccataaaagtctattagatttatttctaggcacttgttaatatagtacttcttaaaattagcatttttgtttttagctatgtgttgtagatggatacaacatgttgtaagattcttttggatcgtctttgtggacagtatctgtgaagaatgactcctgcctcagtctcccacttgaacccaggaggtggagcttgcagtgagccgagatcgcgccattgcactccagcctgggtgacagagcaagactgtctcaaaaaaaaaaaaaaaaaaaggagcagactgtgctccttgccataggattttatccatgttcttttatttctgcctctcaaatactgtttaatcttaacgtatttttaaattttgtgtgatttttctgtttttgagaggaatttttgatatgttaatactatagatcttagtatattttaaaaactgatgatgtttgatacatgccaaatcatgtgtggaccataaatgtaaatagcaatgcccacaaacccacccatagcctaggaattgggagactcagcaccgccggctgaattcgcctgtgcggtgtgtcccattccatccctgttctgccgcccgtgggggaattttgtcagcttcactgagacacttagtaccctccccttacctgtggttttgctttccatggtgtcagttgcccatggtcagccatagtctgaaagtattaaatgggaaattccagcagtaagcagttcataagttttcagttgtgcaccattctgagcagcgtgatcacagtctccctgtcgtgtcctgcctgccgggagcgtgaatctaacctttgtccagtgcacccacgccgtgcagctgcctgcaccttaacccgcttagtagcaggtaccaacatccaggctggcgctcggtcctgttccaagtttcaggcagccgctggaggtcttggaaccatcccccttggttaaggggggactcttgtcattcacacaccatgaaatttacccatgtgaagtgtacagttgagtggattttagttcacagagttgtgcatttatcaccaccaccaattttagaaatttttatcacctccaaaggaaaccctgtgcctcttagccattaccccaacttcccaccttctcatcctcccccagccctggcagccacccatctgcatcctgtctccgtgtatttgcctgttgtgggcatttcatagaaatgtgtttttttgttcttttatgaaatgtgttttttttgttctttcactgagcatgtttccaaggtccatccatcgtgccccctgggtcggtgtgccattccttttcacggctgcgtaatgttcattgtatggataggccacgtttaaaaaaatctgttcatcttttgatggatgtttgtttttttcctactttggagctattatgaacaatgctgctctgaacatttgtgtaacagtttttaggtagtgtgtttttatttctcttgggtatattctaggagtggagttgctgggtcatgtggtaatgctgtttagtattttgaggaagtgccagattgttttccaaggcagctgtacccctgtatattctcaggcgctgtccttttgatgatacccattccatggtgcaggggcagcgatcgctcgggggttttgctttgcagttccacagtggctgaagatgttgcctggccatttgcatattttctttggagaaatgtctgttcagatctttgccatgttttcattggttagctgacttcttactgttgtcataagagttctctgttctgggtactagactccctattagatacatgacttgcaaatactttctcttcattctgtgggtcatcttattgttttattcagtgttctttgaagcacaaacatttacaagttggatggagtccagtttatctgctttctcttcggttgcttgtgcttttggtgtcacatgtaagaagcctttgcctaaccaagggtcttttaataggagttttatttatttttatatgtgcacatatatatatattttaagagctggggtctcactgtgttgcccaggctgttctgaaactcctgggctcaagcaattttctcgccttggcatcccaaagtgctgggattacaagtgtgagtcaccgcgtctggccactgttttcctatatatgataatttctacctttacctgatagcagtctagaagcatgtggggcttgcttgcttgctcgctcgctttctttctttctctttctttcttttttaaccaaattaattttttaaactcttgatatccattgcttgtgctgtgggcaaaggacgtgacctgcatggtacgcattcattctttgatgcttgttgagactttatggcccaataggttatacattttttataaatagtccatctgtgcttgtgaatatgtgtgttctttctttctttgatgcaatattctctatgagcttgttgggtcaaatgtataagtcatgcttacatttttaatatccttaatttatttttgcgtgaattggtttcattaggcttgtaggtttaacagttctcattgtagctcctggaggttttgcatttgatattttcaagatgtcccgttaggcagtgtgtacgcatttggaatttggtcacttccttcgatcatggtccagtagccctcatagccctcttcactccagtcatggtgtttctctggcctcagttcagctgatcggtcagcagtacccactttctgctccttaatgtacacctgaacattttccttatgtccagcttcagccttgctgtggtattttaaaactggaattacatatatatatatatatatattttttttggagacgaagtctcattccgtcacccaggctggagtgcagtggcgcgatctcggctcactacaacctccgcctcccgtgttcaagcgattctcctgcctcaagccttccaagtagctgggattacaggcacctgtcaccacgcctggctaatttttgtatttttagtagagacgaggtttcaccatcttggctaggctggtcttgaactcctgacctcatgatccacctgcttcggcctcccaaagtgctgggattacaggcgtgagccactgcacctggcctaaaactggaattttaaatttttaaccagattgacaacctcttcattagcaactttagactgttgacttatgttggattactgatctattttggatttgtttccatgatcctttttttccctttttctttatttttcctctgagactgagtcttgctatgttgcccaggctggagtgcagtggtgtgatctcggctcactgtaatgtcttcctcccgggttcaagcagttctcctgcctcagtctcctgaatagctaggattacgggcgtgtgccatcatgcctggctaatttttttgtatttttagtagagatggggtttcaccatgttggccaggctggtcttgaactcctgacctcatgatctgcctgcctcggcttccaaaagtgctgggattacaggcggaagccactgcgcccggctcactttttcttctgatgtattgactcagatggttttgctgttttggagtcgggggcatttttcctcctctactcatttggaaggtgcacattccatttaactctctgtattcaagttttttcagtattttactgtggtcacgtacacataacataaaatgtaccatcttaatcattgtaagtgtatagctcaggggcatgaagcactttgatattgctgttgctgtgcagccatcaccaccatctatcttcagagcctttttgtcttcccagtctgaaactctgtcccagttaaacaggaactccccattcctccctccctggctgcgggcgttcaccgttctactccctgtctccatgaatttgactcctcttcagtccctcacataagcgcaatcaggcagtatttgtctttttgtgtctggcttattgcactgagcacattttcaaggcttttccatgtcattgcatgcattggaacttccttgccttttaaggctgaataaccctctgtatgtggagataagcttttgcttacccattccttcctccatgggctcttgggttgcttccatgttttagccatcgtgaataatgctgtgaagaacatgggtgataagtatctgagcctgttttcagttcttttgggtgtatacccggaagtgggattgccaggtcacacggcatttctgtctttaagtgtttgaggagccacaacactgttttccacagcggctacacctttttacgttcttgccggcggtgcgcaagggttcagggtttccacatccttaccaacattttttttttgttttttgttagtattttttgatagccattctaataggtgtgaaggtgacatcatagtttggatttgcatttctgtgtttattgagcatttgcacttttgaagaattgtctatttgagtattttaaccagttttgaattggattattttttgtcaagttttaggagtttctggatattaatcccatttcagatacgtgatttgaaaatatttcctcccattcactctgctgtgtgtcttttaatgcacacattttaacatttttcatgaagcccagtttattttttctttttgtttcctgtgcctttggtgtcttattcaagaaatcattgccaaatccagtgtcatgaagcttttcccttctgttttaagagatttatagttttaggtcttatgtctaggtcttcgattttgagttaatttttgtgtgtgaaatgaggcaaggtccaacttcacattcttttgcatggccatatccacttgtcctggtgccatctgctgaaaagactgtcttttcccctctgaatggtcttggcacccttgtcaacagtctctgctggatacgggagggttcgcttcagggttctctgctattcccatggtctatatgtgtgtcctttcgtcagcaccgcactgttttgatgaccgtagctttgtggtaagttctgaagtcaggaagcgtgacttttacagctttttcaaggtgatttggctgttgggtgttccttgagtttccatatgaattttagggtggattttcctatttctgcaaaagacatcattggtattttgataggaattgcattggatctgtagatcactttcggtggtattgacatcttaacaatattggtcttcctatccatacgttccctagtgcatttagtgggtcccatggtaaagtatttatgtgtcagcatgtagactgggcttaacaaaaatccaaggaatacttgatgttggaactctggtgacctccctcatttccggggttcttttccctggtgtgggttcttttttttttttttttgagacaaagtctcgctcttgttcctcaggctggagtgcaatggtgcgatcttggctcattgcaacgtccgcttcccgggctcaagcgattctcccacctcagcctcccgagtagctgggattgtaggcacgcaccaccacacccggctaatttttgtatttttagtagcgacggggtttcaccatgttggccaggctggtcacgaactgctgacctcaggtgatccgcccgcctcggcctcccaaagtgctgggattataggcgtgagctaccgcgcccggctcctagtgtgggttctgacttgtctgcagtcatccctgaggtgggcattgcggctgctgcccccaggcctccttcatcttgcccgtattgccggcatctcagtccacccagccctcagggactgctttctgtggttgtcatatgtatgtctttgcttagttttcttatctgaggtctgtttccccttaactcttctgtccgagttgagtgggggtgctcatcgcctcagctgggaagctgctcttccatgctcttcctcactctaattttggggttttcagcctcttgctcacatgagctccctcagcctcccaagtagttggggtcacagacgcacacctctgcatctggctcttaagtttttaaagcattttcatcaaagcctttttgctcacaacttgtgggctgttgacatttccagaagccctgactctggagaagatggtggcttgttgtgatgaggtcagaattttttctcacatctcatgggtcagaagaaataaaaacaaacagaatctttctttctttcttttttaagagatagggctggctgggtgtggtggctcatgtctgtaatcccagtacttcgggaggctgaggccaggagttcgagaccagcctggccaacatagcaaaaccccatcttcactgaaaacataaaaattagctgggtgtgggccgggagcggtggcttatgcctgtcatcccagcacttgggacgccgaggtggacagaaacctgaggtcaggagttttgagaccagcctggccagcacggtgaaaccttgtctctgctaaaaatacaaaaattagctgggtgtggcaacgggcgcctgtagtcccagctactagggaggctgaggcaggagaatcgcttgaacccgggaggcggaggttgcagtgagctgaaattgcgtcactgcactccagcctgggcaatagagtgagactccatctcaaaaaaaaaaaaaaaaaagactcactgaaccagaagagttaagtgttgtgctattgactgcacatggtttgcctcagtcccaagtggtaaaaacagactgctcccaaaacagcaggccatgaggtgaccaggtccagcccagcccagcctgcagaggaggagccctgtggggctgtgatcagagcccagcgtcccagtgcacctgccgatgccctctccagcctctggcttccttccgttggctgtccttggagggctgtgcttcgtgggcaggcgtttggtgtcctgagcatgcagactgcccttggagtggtgggcaggattgttttagcctaaaggggttccacatctgcacgggagctcttgctgatgggtcactctggcaaagttcccccggcgggttccctgtgagaaggcacctcacggtcagttctgggtctggtgagtgttctcctgcaggctccacgcttgagccaggttctgccggaagaggcggcgttgggttcccttggtggatgagaggcgccgagggtcttggtggctccatgtgcccccaagggcagcactttgcatttcttgggagacttgaagatgactgatgtcattttagtgagcacggtaaaacagcacctgttagcggcttataccttgagctctgtctctcttcttggaggtgacatggggaccagtgcccacctctcccatggcgtctgagtggacagtgtctaaggttttgggcccgctgacacagatgtggttgaagtcagcttgtgtgcagatggggtcacatagaaagaatgaaaactgttgaaggctttgctcagcatgttttctttttggatattcaatctgataaatgttgtagtgaatgagaagtggatgaaatcttttttttttaattttatttttgagtcagaatctcgctctgtcacccaggctggagtgcagtggtgcgatttcggctcacaccaacctccacctcccaggtttaagcgattctcctgcctcagcctcccaagtagccgggactacacgcatgtacctccacattcagctaatatttttgtatttttggtagagacggggtttcaccatgttggccaggctggtctcaaactcctggcctcaagggatccccccacctcggcctcccaaagtgctgggattacaggcaggagccactgtgcccaacctaaaaagtggatgaaatcttcaaatggttggagatcgtgaattttgttttagcagcactagggatagtagaaatacaggtgtcatggcttagggagaaaaagtatgaacacatggttttgttagcagtagtactgtcatttctagtttatgtgatgaaacatcttaatgtactgcttcaaagatacactgagtgtttgtgttttaggttaaataggattgcgaatcaggtggccattcagcggaagaagcagtttgtggagcgagcccacagctactggctgctcaagcggctgtccaggaacggggcccccctgctgcggcggctgcagtccagcctgcagtctcagcgaagctcacagcaggtacgtggctcgtggcccccacagcctttctgcgtctctcacccccaccctccagggagagggcacctggttcaggctggtcacggtgctgccccctgggctcaggctccccgttgggaagcctccgtctcgtccagccctggagctgtaggaggagtcgggtgcactgggctctggatctgcgactcggggggtgattctcatccatgcctgtcactgggtgtttcttccgttttgagttgcgctcccccgccctgccctgcccgcacacacgctgatgggcagtggccagctctggggactggggatgctcagggatgtgttatgctgtggctgcatgagcgtccgggctggggacagcaggagtgggacccggtgagcacacccgggccatgtgggtgggggtctgtgtgctgggcctggagggtgggttttggaaatatgtgaggagtggtttatttcgagggccttgctctgaaggttggtttagctgggactgtggtggggtggggagggctcgagagagctgagagagtgggagggaaggagcaggacttttcctttttaaaagaacaaacccaaactcttacattttgatagtaggtttgagtttatagactcatctgatactgtgaaacagttctgaaaaaatgggtttacagagtgaagtagcttctgtgagatgcacaaaagtaattgaaaacacaagcagctctgcacacggcccaggacctgcggccagcgccctctgcccacgctgcctagtgaggagccgctggtcttttggaagagctgtctgctgctggcgtcgcgtggcctgagtgcctcttggaatttcctcatggtgcttttcactgccatcctgggcacgaagcgaaaccatcctgctctgctgtgaggtggtgacttgctcacaggaagcttgagtctacagggttcacggttgggtccccgtgcggtggtgcggtggccggtgctgtctctgcctcgcagactctgcctctgcagcgtgagccctgttcagtcacctgccgtggctgccttgtgctccagggaactacagagtctggtgctctggtctggcaggtggtggtttgtgggtctgatttggtgtggtggggtccaaagttttctgacggccttggtgcgtcttggctgtggaatattccaggtctcccgtgccgtccacctgggttgccccactgtgtgtctgtccatggaacttggggctccccgggcaggtctgtgagccagcccctctccaagtgagatcctcacgtgtccacagagttgaggcttcagtgaatgtcttttggctgttgaatgagttaaccgcatcttccgttccatgatgtgacttggctttccatctctcctctgtcctcacctcgtagcctccagggctcctggaaaggacagcacggtttggggggctcttaagaggccagagtcaggaagtggctgagcggcgggaagctctgggggctggaggcattggtctcggcccccgcgatgttggggaaaggaagagagtggaggcattggtctcggcccccgcgatgttggggaaaggaagagagtggaggcattggtctcggcccccgcgatgttggggaaaggaagagagtggaggcattggtctcggcccccgcgatgttggggaaaggaagagagtggaggcattggtctcggcccctgcgatgttggggaatggaagagagtggaggcattggtctcggcccccgcgatgttggggaaaggaagagagtggaggcattggtctcggcccccgcgatgttggggaaaggaagagagtggaggcattggtctcggcccccgcgatgttggggaaaggaagagagtggaggcattggtctcggcccccgcgatgttggggaatggaagagagtggaggcattggtctcggcccccgcgatgttggggaaaggaagagagtggaggcattggtctcggcccccgcgatgttggggaaaggaagagagtggaggcattggtctcggcccccgcgatgttggggaaaggaagagagtggaggcattggtctccgcccctgcgatgttggggaatggaagagaggcttttttgggaggaagttgagggttcagatcttgggtcttatctcggggctggacagaactccaggtaagtcacagaggagctgttgaagggcagattccatggaaagtgggcatggatgtggccaaacgggacgtccagcggtgggaatcatcatttctactctcataagctgggacacgagggccagaatccctgcagtagcaggacacgtgggccagtgggcaggggccacggggacccaggcagctgggggtggcctggggcgtggtggagccaggcaagggaagggggagggttgcaaagaagaggtgacccgctggaacctgccagctgggccccctctgcttcatcgctgcctgttaggcctcacgtcctgttgtgtgcagaatacgtttgtaaggagagaacatccccacagcccggccagagcagctcttctggcagagggggcagcttctcgaagtcacctgggaaggagcagaaggagctgcctggacttgagccgcagcagagcagtcggcgtggagagcctggaaacctgcctctgtgtgaacgggctattgggagagactgtgcttctgccttctcctggccagggatggccacggcttggtgtggtttcatggttttgaagctttggaagtacctgatgcatttgattcctctgtgtctctgtgtacctgccccagcctgaccctgtggtgggggcaggtggatgaactggacggggtctcttgagaggccagcaggcgccgagggtgctgcagcgatggcgggtctgtgctggctgcgcatataggccctggtttttgttctggtgtgtgtggccgttgaaggccgcagggagaacgggggcggcagcttagctttataaagggtgagcagcgatttgtgtgtatgctggtggcgtcccactgtctcctgctcccgtggcccacccttcctgtcctgggagcgcatcctgcagctttcccagtgtctgtcctgtggcatgctgggcgctgctgcccacatcgtccttgctgtgctgcgtgtgtggcctctgccagtcccacgcacctgctggcggcattgggcccagtggcaggagctgggtgctgttgccaggaggcctggggtcggccactctgtaacactgtgggccctcaccccaggagctggcctgtcctcccagcagaggcgattttaacctgaccgtcgcctagccctgccctgtgtctcccccatgtgtctggaatggacgcggaggcgctcagcttcttcccggcagtggggatgcctgagtgcttcttcacttctgtcctttctcgtggagcctcccactgttgatttttacatgggaaatatcgagcccttgagagccgagtaaggaaccttgatccttctgagtggatgaggctgcatgtgtcatgggaccttgggcccaggtgctgtcaacggggcccctgccactgccgatggcgtttgttaaaccaggttggggagcagactagtaagtttgcttagcagccagtgcgtgataaagggcttcctggtgatgaggagatttcttccgcttcgtaacagattcccaggccaaatgtccttttggccgaggttttcagaagtgtcgattgcaagctgagggacaggcaatactcagatgctccggggagcttggtttttggagcccacattttcctgcctttgcttgagttgatgtggatcttgttactcttagccccgatttcctgcctgagggtgttcagcagcattgaggaaaacccagagatcctcacttcaggggacatcagcgcagcaacgctctgcctcgccatggagaggcctggccttgggggtgggggtgcggggctcggcctccctccttgagcctccttttctgagcagtttggagtccggggtccttgcatcttgtagtccagcagtctttgccttcacaccctcggtcctttgaaaagctatgacagtaccctgaggtgggcaggtgggaacccggggacagaggcgttgggggagaggagggtctcagggctgtgaagcatgtgccagaaactgatggccacggctgtcctgaggctggcagggcgcgcgtgtcctgcagctgtggaggatgacaggtgttgggggcccactcaggccaactccctcgttgacttcctctcccctttgaggtagggtcagggtgccccggcactgtgacgagcaggcctcatgcggccaggcctgggggacatggtgaggacagggctgagggcagacccaggtggcctactctcctgcgaccatctgtgtcatggcctttgcagggctctgattttcttctgatcaccctggtgtggatgttggctgggttgaggctggcggcctgtgctgtctggcgcactcttctgtccactgagaagggagcaggtgctatcaatggaaatgggaccctggctgtggggaaacgtgtgtcgggatggaggcgctgtgcagggcagggcagcaggtcggctgtgtgccaggcccccgtcatgctctgtccaagccaggatgggcccagcatgtggttttctgtgcacctggtttctttccagccgctccctccattcccagctgtcctggaggtgggtcctcaagggtcccccattctgtcctggccccgcctttgtgggcctttctggttctgtgaaggccccccccgccgccagcttgcggaggcctctgtcctctctggagggtggaacctgtgcaccggggccagccccctgctcaccttggcctggcggtcccctctgtcccctccatcccctctgtctcctctgtcccctctgtcccggtgctgtcctggggctctctagtgagggtggtctgttgtcctccccaggatgggcctgcaggacccctgacgtggatgcctcttggggtctcacctgcatggtatctgaggccttttgcagaaggagcctctgggtttgactgacggaagtgttcactgttctcagagagaaaatgatgaggagatgaaggctgccaaagagaagctgaagtactggcagcggctgcggcacgacctggagcgcgctcgcctgctgatcgagctgctgcgcaagcgggagaagctcaagcgtgagcaggtggggctgggcctgtcccgcgtggagtgcaccactggccacggggcgtgggtgggacgctggcagctcctgcagagggtgggctgcacccggtgggtcctggcccacagcagtgccttgctcagcccaggctgggtgcctggctgccatgggttgcagagccctaagtggaggctgcgttgtcctatgcctggacggaagcacaggagcctgtgggggctgcttgtggctgtggggcgcgtggtggggctgagacgcatgtgcggctccctaaagctgaggctctgctgggcccccccaggtgaaggtggagcaggtcgccatggagctgcggctgaccccgctgacggtgctgctgcgctcagtgctggaccagctgcaagacaaggaccccgccaggatatttgcgcagcccgtgagtctgaaggaggtgggtgtttgcggcgctcgtctgtcctgccgcatgtgtgactgtggatttgtgctgccgtttgaccgggaaacgtgtgattggctagagtacatcccttgtgttcttaattctcgtttttatttaacgtatttgtttttaaattataaaagtgatacatttcattgtaaaatactgaaagtgcagtgggcaagaggccctgtgcagacagtaccctgggctgtggcagcatccgcccggcaccctccagcgtgctttagctgaaggagctggggtcgggaaggtccctgcagtacttgggtcttatgtctgtaccgtctgcgtgtctgtgtgtggctctcagataggatgggcttgtgggttatatggaataataaatatagagtcaactaatatcctgttttagtttgtaaatgattctttttcctccctaaaattaggtaccagattatttggatcacattaaacatcccatggactttgccacaatgaggaaacggttagaagctcaagggtataaaaacctccatgagtttgaggaggattttgatctcattatagataactgcatgaagtacaatgccagggacaccgtgttctatagagccgcggtgaggctgcgcgatcagggaggtgttgttctgaggcaggcccggcgcgaggtggacagcatcggcttggaagaggcctcggggatgcacctgcctgagcggcctgctgcggcaccgcggcggcctttctcctgggaagacggtaagaactggcgccgtgtccggaggaggtggaagacgctctttctagcagactctgtcctgctctgtgttgccagctccctatcagcatggtccgggagccactagcatgcaaccgcatacatcatttacattttctagtagcctcactgaaaaatggaaaagaagcaggtggaatttactttaataatatgtcttattttactcagtgtatggaagagttgatttcaacatgggatcggtaaacgttactgaggatatataagcttttcaccttctttgccatctgatgtgtattttacgctcagcacctgtcacttcagactggctgcgttttgggtgcccaccaagaggactgtgtggctgtggctccctatggggtggccggtctcgacgatgcagacccagaaagcagcttagttgggggttttcatccagagtgggcctcggctaacttctgagggtggcgtgaagccggaggatctctggctttgcctccagccctttaacttcgtggtttgcgcatgttgtagaaagggctctgggagtgtgtccacggcccacctggactccagcctgggcttgtgcttcttggttgcccaggcacgtgttgcagccatgtgtagtcacctgcacccttctctagactggtcctcggaaaccggggctgtcccctgcaccctgcttgttagtcgcacctctgggattgtctgtcgaagggtgtgtcctgcccacatgggttgtcaaagcacatagagctccagcacctcagctccagctctgagccacaaactgagcagaaatcacggtgtgtttggcttatttgtctaaaggtcccatatccctgatttcttggcctaccctttctcttgatgaatcactgacccgtgctaggtcgcttcttctgggatgaggcctggccctcttcctctcttccacgttcccgccatcgcggggtccacgttcccgccatcgtggggtccgcttcccgccatcatgggattcaaccaagctgggccatcgttgcttcgccctctgttcccctcatggcagcagtgctgggctccctgcttcccgtggggtcccgcagcactcggcacctgtgaggattggaggatgggctgtactcttttaaagactggggatagggccaggttctgtggctcatgcctgtaatcccagcactttgggataccgaggcgggtggatcacttgaggtcgggagattgagaccggcctggccaacatgcagaaaccccgtttctactgcaaacacaaaaaattagccgggcatggtggcgcatgcctgtaatcccagctatttcggaggctgaggcaggagaatcgcttgaacctgggaggtggaggctgcagtgagcggagattgtgccattgcactgaagcctgggtgacagagtgagaccctatctccaaaaaaaaaaagaaaaaagagagaggccgaggcgggtggatcacgaagtcaggaggtcgagaccatcctggctaatgtggtgaaaccctgtctgtactaaaaatacaaaaacaaaattagccaggcatggtggcgggcacctgtagtcctagctactcgggaggctgaggcaggagaatggcgtgaatccgggaggcggtgctctcagtgagccgagattacgccactacactccagcctgggcgacagagcaagactgtctcaaaaaaaaaaaaaagaaaacacaatggaaatatatttttattctttgtctctgattttctgattttaagagtaacacgtttttcttggagaaatttagaaaataaacacaggctccaaacagtgctgctggctcttggtgaacccgggtggagctttaacccctctctgaagctgcgctctccaggctgatcagaccagctatccttttccgaaacattcccttggggacctgagaggagccagggctgagccgcctcagagtgagcccagggctccatgggctcatgcttgtcctggaaggtccttctctagcctctggtgaccgtgggaaagcttcccccgcctcccacagccatcacgctctggcttggatgccttgcctgccatcagctctcagacgcccacctggtgcccgctgctggctgctcaggacgtacgctggttgcctgcccttcaaagcaggaagatgcatcactcttggactccctgtcttcttagcagcccggagcctcctttgcccctagggccctgctcctgtgctcccccacatcatgctcccagcaccatgccacctccctcgaacagagcaggtgtggaggcctctgagtgtcagcgcctttcagatcatggtcatgcaagttgttaagtgaatttctacacccgggtttttttgctaaggagaaaatgaaggatgagaagtcctggtttctttctttctcagtatttgggagtgcacaggtgagccagtggccatggtgtgccttgagggtgcacctgctgctcttctcagcacggccgacacctcccattgcctggagcctgagccacagacctggaggccgtgggtctctgttttgaaagaaacagacgtttcgaggctttcttcttggggtttcaaaggatatgtttttttgtatgaacatttttgagtattatctatgacatttgttcagagtgatgttatggatacgagtcttgaaggactgatttgtttctctctactactttatttattcagccaaagagacagatgctttcagtaaaacacctgtttctagatgaagagagttcatgtgtttttgggcagtcttacttttttttttgtcttctctctccttcttgctctggttttatcttcagatagctctgaggagcagtttcttttcttggccatctcttacttatttaaggtaatttgtgctttataaattttggtgtttttgaaagcgaagtttctagggactttgtagtaaatacgtctgaaattcagaatgatctgtgaattttacaacccgtttactaaagccacacaatgatcagcatctgaagacttcagctaagacaccacttaggacgtgcaatggccctaacttaacacatttgccagtcgtcacctctgtttgcagagccagcgcaggtccagctgagttgtgctgggttggtggagcgtgcgcctctctctggggtctgtgtgctgtgccctcacccaggcagccaggctgtctgcacaggcagcctcagtgggtcctggtccaggagaggttgcgatcttacctggacgctgccccttctgtgctgacagtgtcatgggagtagaaattctccatcaggagcatcccagtgtgttcctgtagcagcagctactcgtgggttcagagtgcaggggaggggcctctggtgagcagggcctgggcctcgttgctaacagccactctcagggccttggccgaaggtgatttgaaagacgggaccggtgatgtgttcccagaaggtgcgtgggacctgatgactgacagcatgtgtcctttggttcagtggacaggttgctggaccccgccaacagagcccacctgggcctggaggagcagctgagagagctgctggacatgctcgacctcacctgcgctatgaagtccagcggctcccggagcaagcgggcaaagctgctcaaaaaggaaattgcccttctccgaaacaagctgagccagcagcacagccagcccctgcccacggggccaggcttggaaggcttcgaagaggacggagctgcgctggggccggaggcgggcgaggaaggtaagccacggtgagggctgccccgctttcttgccgtcacggctcaggctcaggcacaggcacaggcacagacccagacacgggcagcagcgttggtgtgcacggaggctcaggttagcgccagttccgtaaaattcacaaatcccggaacacttgattttcccactgggctgttgtttccttttaaggagacgttatcatttgtgctgtctgtgttttctcacataatcagttgataaaatttaaggcacagaataaaatttttctctttaacttgggcctgagaaactatttgaaaagaatggtttagatcttacactgtgttgaagagtaaaggtagcctgaatgatgagagtgagaaatgtttttgttgcattttgtaaattggcggggagccatttaattgtgcgctaggccatcaaatgcagcattttgaaagggctgttttagattattggcacttaaacactcctccctgatgttgtgaagggagggacggtacctgcagaggccttgtctgccccgagggtccccggccagctcctctgcagagttggtaggtagcagccgtgatcgttgccaaagaatgtctggggaaaggtccaggcagcaaagatgtttttatgactaagaaataaatgtaggagaagaaatccgcctatctagaaggagaactagcaaaacccagggcaaatgcaggcttggcatggtgaggagggagtttacgagcgatggtctgtgtacatctaggttggcagggtgaggaagtagagctggtgtgtcccatatttggtgaaagaggaattttaaaactaaatcggatttggagacgttgatagaaagtcattgccactgtgttttgccgtgtgtctctgcagttgaccttgacacgctccggttacacgaagcagacagtagggtcagaccctcttgccacaacattggcagctggttctcagccttcttgcccttcccctgcacatccaagtcagaacagcagacagttgaaataagacacagaattgttgtacaattttcttttaaaacaaagacgttcatctcttatggacgtctgtgctcggagtgacgcagtgtcttcatgatgccacacaggtcagcgggtccccatggtctcagggcccttttcatcccctgaacttcttgtggctcctgtctgcagagcttcgccccttttatcctgttttacatttgggcaacttgaatgagagccattaagcttttctttctcttagaaacttactcctgtgcacacagctgagaatttcttatgcatccttttgctcattttgtgcctgtttgttgttctgttctgggattcttctgtttagttcaccatagtatagtacccagactctagaatgtctcttttggggctggcgtcaattacgttaggtccatagaataaaggcttttctatttcaaggtgagcgcttggttttctcttctcccaaaggctgttattgttggcacgtgatccctcctctgctttgggggcctcgtgttttttctgaggaacgtttgcctacaggaccctctggcagccatacctgtccgggccctgggccgccccattgtgcccaggagtccaggctggtgcctggtcccgcagcctttgcttccgtgcagcccaccgaggcatcctctggctgtgtgggcctccctctaggtggactgcccttctgtccttgtcttctgtgccctgaggactgagctgtgaggaggttgccagcaggtccactcaccattctcaaaatagcttccagcgcttctcttcgcacacagttgtaccattttcactgtagagcagtaagttacctttttagctttttttttttatcagtggcttcctccattgccattgggtcacagggctgaggaccccgcacggttattgggtcacaggactgaggacctcgcatggttgaggacctcgcatggttggagctgcttggccctccgctgtggtgagcgtggctcctcataacacccaacgcttagcaggagcctttggagaccatttttgttgctttgtagctctggaatcattttatttttattttttttctggggccattgtaaggaaaacacaatgtgactgagacacaggtggcctcgaatcacctgttacacccaatgttcacaatgactcaattgatgaaaagggcgtttcctgtgagctgatgggaaggtgggtggagaagcaagtggcctgaaagtccactccgaggtgaggcgggtggggtcctgcccctcagagaagttgggggtctctggagaggtggggcgggcggggtcctgcccctcagagaagatgggggtctgtggagaggcgagtgccagactggaatggggaagtcattagggaagacagccacaagcaagcttgttggttggtatagaaatgtgacttacgatacttataataggatgaaaaccaagaatcagacatttaaaaacccagcatgaacgttctcatcagtaaagcctctccatcatttttcttaaatataaccacaatattttcacacctgaaaagagtaattcctcaatggcaaatacacagtctcacttaaactgtaatttaacagtctgtgtgttgtgtttatattttgcttccacttgaagcagcttgaacaaggctgtagccgttgagtgccaggcccctgagactttagtgtctgaaggaaggagatgcctcctgggctgcactgttggccccggtctgccccttgtacaggccctcccgcaggctctgccgtagccgcgactcagtctgccgagtgcagaggttcgggctgttgctgtgagctggccctgccagggctgacttccccggggctgcgtgtcagctgggtgggggccacgccacagctgggattccagcctgtctgatgagcctgtgggacggatctgcagctggcagagggcttgtctccaccctgtgctgaggttggtgtctgctgacatggtgaggcaggtcagtgcagtcaggaggagcagggtccgcaccgtgagctggtgaaaggggcttgcatttcgagtccttgggatttccagtcacagtgatgcccttgccagaggctccggggcgtcccctttagtccagggcagctgtggtcccttgaagtgcacgtgtggaagtccccctgccgtgcacgggcgctgagcacgtggagaactgtggccctcaggaaaggaaggatgcatgttcctcggggtagaaggtgcggagtacgcagctttgtcccttcaggattgcagaggacggaggcttgaggcagggttgttggagggacagtgtggttgctgctcgtgagctgaaatgtctgcctgtgttacgctgtgattttccaaagcgtcttgtggcttcgatacagaaacctttgattgacatagcaggtggccaggtgggcaaaatattgcggaattgttcttgcagacttaactaggttttagtttcttagagtagctggtttggattagataaccattttgccatttggaatatgtgacaagttccagggactggaattctaggatcctgactgatacattgacggggtctgagaggcttatgcccgagttgtatcgagcatgttctgagcttttcccatgtgcagttcagtgacagcctgagatggcccagagtcagtgagctttgagaggagtcttccttcttgtatgtcaacttccagtcacatttccactcgagggacgggttgggcttgcctgttgtgtcgtggagcctggaggctcaggtcctgtttttttctgattttatggatgaggaactgaggcactgaacggtccgggggcctctgtggtcccggctgggggaggggcctgtgtggtcccggctgggcaggtggctgagcacccagacgacagcgacctctgttcctgaccacggcctcctttgtgcctctggtcagtgctgcaggaacgcatcctttagcctgcgtgctggcggctggagcccggcctgcatgtggagctgccgcagagaggccaggggcgtgtggggtgcatgcatggctgagacagggccacaggggcccgctttgggatagaccaggggttagggaagtccctgcagcgtggagatggttatgagtcccacatggggcatcctagctgggccgagagctggaggtgtggaggaggggttgtggaccatggttggggagggcctgctgcaaggcagggacgtctgcacgtctcagggctcctgccagacaggagtggtggttctgagggttgcaccagaagcaggagatgggggtttacggtgcccgttagatagctgtggagaaggtgggctgtaggtggttgggggaaggggggtctcccggaggtgctgggaggagactccttcaggctccatctctgctggccgggtgctgttgcacccatagaggccaagactggggttgaccactggccttggccctgcagaggccattgggattgcagtgagcagttgaatgtcgtaatcagggcgagagctcggggcgggggggggaggctaggaggtggaagaggaggcaggaagtgaagtgaggccccaggccctgtgccccagacaccagctgcgtcaggacgctgcaggctcagtgctgaatcccctcctgctgctgtacaggcaccagggatgctcatgagcagcctttcagcagcccttctccgcattgcccagttccctccggccagtgttcccaggtgtttcacaaacaccttttccttaagcctgttggcgacattgaacaggagggagggagttttgtcacctcgcatgtgcccctgccttgggatccagcattcccacatgacagctgtgctccctgcggctgacacgggaggctttttgttgaggtgaggcttcccccttgtatttgaattggctgtgaggtgctctaaggcgccgagtgtcatttaaaatcagaggcacctcgcagccgaaagcactgctgcccggcgtcatggcccagccttgggagaactttcttcagcctcaaaacattgctctgagtcctgttaagttgtgtagttttgtattttcaaaacaactttttgaatgacaatagtaaccatacatacttcaaacggttttaggaaagtttgcaggtttaatgaaatgaaaactgtacccagtgataatatatactaaggattatttaaagtgttttatgtcactttaaataatcacaaaatccttggttttatgtcacacttcctgttgtcagtaccggtcctgcttggaaggaagcctcagtggctgggcttggcttgttgtggcgtcgcctcgccctgttagcctcgtgccagagcctgtccggccccctggactcgggacagtgcacagagccccacagaccagccccaggccgtcctcctgacctcgggctttttaccatttcacacttccggtttttataatgtcaaaaagactttaaaaagaggttaaagccgtctttttccaaagacttcttatttttaaaagtcagatttttttttcctgaaagctcccatcacaatatttgggaacgtggcacggacttctgtgctgtggggagcggggcttttttccctgcctttcttgaaaatcatccacagccactcaccactccctgttttttttgtttgtttgtttgtttttgcatttttgacttaagaccttgaccagagatcagatttaatgttgccttccttttatttgctaacttcgtggcccagtagagctctgtgggaatgcccgtttaaggcccctttagttatgtgagataccttttcttcctcaaggtaagtgaattattcattgcagaaactgtcatgaactcgagtgacgtgtttaatattggcgcatgtgaaataatctttcacagtttttttcagagagtaactgtgtgcctgggcactgcacccagggccgcagcctttggcgttagggaagcacacacagtgtggcccgagcccacggggcccacactgccgagcagacagtacatgcgatgccttgtttccttaactgaattagtattttggtggacttcacatttatagtaagttttataatagattttataatcttcagttttcaaaaatcactttatttataattttttcaggagataaatctccccctaaacttgaaccatcagatgcattacctcttccttcaaactcggagactaattcagaaccaccaaccctcaaaccagtagaactcaacccagagcagagtaaacttttcaaaagagtcacatttgataatgaatcacatagcgcttgcactcagagcgcactggtaagcggacgccctccagagcccacccgcgccagtagtggcgatgtgccggcggcggcggcctccgcggtggcggagccagcaagcgatgtaaacagacgcacttctgttctcttctgcaaatcgaaaagtgtaagccccccaaagtctgccaagaacactgaaacccagccaacttctcctcagctagggaccaaaacctttttgtctgtagtccttccgaggttggagactcttctgcagccaaggaaaaggtcgcggagcacatgcggagactccgaggtggaggaggagtccccaggaaagcgcctggacgcaggtaaatgccgcgggcggccctgagaggcgcccttgccgaccagtgcctggagcgtccttcaggatcattggtgtgacgggggggggggggtgtccagcttctgtttttgcagcattctcttaatttccagagaagacaacagtgcagtgttttctttgaaaagccttgagttgcgggtctgaggccggcgccttcgtggggggcctgtttgccacgagagattgtgcaaccttgctgggctgccctgggccaggggtcgatggtccttggtcctgtcttctgccacatacttcctctctgatttttttttaagagagtcttgctttgtcacccaggctggagtgagtggctcactgcagcctccaactcctgggctcaggtgatcctcctgcctcagcctcttgtgtagctgggactacaggtgcacaccaccactcccagctaatttgaaaatttttggtagagatgggggtctcgctgtgttgtcccggctggtcttgaactcctggcctctgactcccaaagtgttgggattagatgtgtgagccgctgcacctggccccttctgatctttaaaaaagtactgagaatgaattcaggtgtagttttaattggtcatcttgactttgctgtgcacatctggataagctggtgactggccgctcccagcacttgtgggagctcgactctgcaaccctcagtcaggtctccttgcagccccacagacctaggacctggggttgagcctggcccttccctggacctctgagaggacctgcccctgtggtaaatgcagtactttgcagttgatttcagcaacatttactcattgttttatgtggccctcttagccacatatgtgatgaggtattaggacctgctgaaatagcactggaaagcgcttctcatctcttgctgcgcttttgtaactgaactctgttgaattcctcggtgagggtgttgccgtgtgtgtgctgtgctgggagcactttgaggaggccgctgtgttcctgcagcctctgctccccgcccctcagaggaagctgaggagtttgtcctttaaagaggagcagctgtcatcggtttgcttcttcggtactggctgcgcttctggaggtgccggctcaggttgccagcgactcttttctggaagcgtgtctggagcatgtttgtcattttggtttttgtcccgagtcaaggcttggttcccgtctgtcctgtctgcctgttatacctagataaggagatgcgcattttctcctggctgtgctggtgtgccgtggtgcctcgtgcacttgagcagtgagagagggtggggctgggtgggtgttgcttatttcccagagtggcagcaagtgagtcctgtgtcatggagcctcaccaggccgggtgcagatggaaggctgtggtgggcaagacctgcccaggccactccctcacatcttgtccctgttccttctgctggtctctggcctgaagcgtccggggaggggagtgagaccaggcactgtcaaaggtctttgtgcagaaggaggctcacttcctacccttgccagcaagcaggtcatgcgtcttgttgccaaagtaatttctggtaaatttcattttgatttgtatgaaaattttgcacgtaactgaatgtgtagaaattttctacccatgtccttttactttgatggattgatgttaaattggcattttaaaataatttgaaaaagcttttttgctttctaagtaataggaagctattgaaatgtttcacaagataccaataagaatagatgtccttgactcaggactgggggatgtgtcttaaccacgttggtctttcttagccacctttggtgaaagactctgacctggttttccaagcaccccggaaattctgtgatgaatcgggtcagggtgctgtgcactgggtactagaggttgggtcagtgtaattgtgggcgtcccctctgcatgcagaacttggagttcggctgacgctccacttcctcggggtttcacgtctgtcggcggcagaggtatggggctgcgtgcgtggaggccctgccggccgtggggctggggtttgaggcggcctcccgtcgacactcagcaggatgctcacgtggtggtttccaccaggtggccccacctgaccgggccctgccccagctgtgggctcccactgtggacagttttgccggctggcggccacgtcctcagcaacctctcaggctcgttcatcagatgtcccttgtagaagagcacgtgtcccctccgggccactgtcttacattggagtggagtgttttgcgggcttcccgtggtgacggtggtgtagagcagtcttactgcagaccttcagtgagcgtggcccatggtggcttttgagaatcatggtgccctctgatcctgactgaagtggagatttctgctctctcatttccgagtgacagtggatttccgtggaggtgcggtgagttcctgagctctctcctgagcagccgggagcctcagcagcattaagaccaggccctcgggagtgggaggcattccactgctgtggccgaggcgcccggggaagggctgggcgtgctctgaatggtgccagtcccgccatccgccctcgctttggtttcaccggaaccttctggtgctctgcacatgggggatttcttgcccagagctgcagttcttcgcagtcttaggacaggaattatccggaaccttctgatgttttccatacatgcatctgtgtgctctgaactttagggagttatctggcattttccagcacacgcacaattctgagttaggctgaacagggtcgctggtcctgaggcgacgcactcactgtgggcctcctgcccgtgtcgcccgcgggccggctgtgctgtgcgccaggcttctgttcctgcgatggcccagccccagagtctggccctgactcgtggcttccttcctccgtgactgcacgctcaccagcagtgaaccgtcacctgaagcggccttccactcgccgccgttgcggagacccctgctgcgagtctctgtgtgcacgtgctggggcgtgtgagagcgtgggggtgtctttgtctactcgccgccgttgcggagacccctgccgcgagtctccctgtgcacgtgctggggcgtgagagcgcgggggtgtctttgtccactcaccgccgttgcggagacccctgctgcgagtctctgtgtgcatgtgctggggcttgagagtgtggggatgtctttgtccactcgctgccgttgcggagacccctgttgcgagtctccatgtgcacgtgctggggcgtgagagcgcgggggtgtcttcagtgtccttcggctgttcagggaggaggctgagctgtcctgccctttcattcagactaaatggctttttcactgttttccaggttctcactttaaccactaatgtgctgggtagttcactctttggaccctaatcattttctcttacctcaacttggactggagttctgctaagcggccgttttggaatgcacaaagatcactgcatcttgcctttcacttaattcttgcggatcacattggaatcatcagctcaaacatcctctagacaaaatcacaaacagcagccctggaggagctctcccccaccccagcccaccccctctgtaagtcagagcccggcagtgggaatggtgctggcgcccggtgcacgcctggagctggcgggatgtcgtggcacctcagccttccctctggacagtcacgaaggacgcagaggagagcccggcaccgactgggagcctgctgcagctgacgacacagtggacagcattctgaggctgtcctgagcatgtgcggagccgtcccatagtgactggtggtttgggtgtgacggccatgcccaggcgcgttgtgctgtgtctgtgccatggggtatggaggaacttggctcggcactgtctgaggatgtggcatggacagtgcgtgctcactcactcgctagcatcttctgtatttctgggttttctacctgatttccttctccccttacttccccttcctctgttttttccccacaatgcccagtggattcttgagcagtgctgctgtttgtctcttgctggtcaccacgctgagtgcccctgcggccaactgagaagtcctgctcgtggggtggggcatctgtgcgtgggatcttgtgcaggcgtctgtcctgggccttgggtctgtctctgaccatcccagctgcattgtcatggagctgggtcccagcaagagcaggtctcgtgcaggcgtctggcctgggccttggttctgtctctgaccatcccagctgcattgtcacggagcgagtcccagcacgatgggccttgggtctgtctctgaccgtcccagctgcattgtcatggagcaggtcccagcaagatgggctttgggtctgtctctgactgtccccagcggcattgtcacagagcaagtcttgtgcaggcatctggcctgggccttgggtctgtctctgaccatcccagctgcattgtcgcggagcgggtcccagcacgatgggccttgggtctgtctctgaccgtcccagctgcattgtcatggagcaggtcccagcaagatgggctttgggtctgtctctgactgtccccagcggcattgtcacagagcaagtcttgtgcaggcatctggcctgggccttgggtctgtctctgaccatcccagctgcattgtcgcggagtgggtcccagcaagagcaggtctcgtgcaggcgtctggcctgggccttggttctgtctctgaccatcccagctgcattgtcacggagcgagtcccagcacgatgggccttgggtctgtctctgaccgtcccagctgcattgtcatggagcaggtcccagcaagatgggccttgggtctgtctctgactgtccccagcggcattgtcacagagcaagtcttgtgcaggcatctggcctgggccttgggtctgtctctgaccatcccagctgcattgtcgcggagtgggtcccagcaagatgggccttgggtctgtttctgaccatccccggctgcattgtcacggagcaggtcccagcaagagcaggtctcgtgcaggcgtctggcctgggccttggttctgtctctgaccatcccagctgcattgtcacggagcgggtcccagcaacatgggccttgggtctgtctctgaccgtccccggctgcattgtcacggagcaggtcccagcaagagcaggtctcgtgcaggcgtctggcctgggccttgggtctgtctctgaccgtcccagctgcattgtcacggagcgggtcccagcaacataggccttgggtctgtctctgaccgtccccggctgcattgtcacggagcaagtcttgtgcaggcatctggcctgggccttgggtctgtctcggaccgtcccggctgcattgtcacggagcaggtcccagcaacatgggccttgggtcggtctctgaccgtccccggctgcattgtcacggagcaggtcccagcaagagcagggtgctgttggaatcttcttccgtgtgtgtttttgttgagaggttgaaaaatgcaccaaaactgctcttcttttaacgatggtaaaagtgaaactgaaaacaggagatagtgggctctcctttgtcactgcgtggggccctcagggctctggtcttcagggtgcaggctcagcccacctgcttcatacggccaagcttcccatgagccggagaagccgaggtggcagcttgggtgccagcggcaggggcgggcaggggcgggcttgtatcccgtgttgtggggttgcgttcccatggctccgtgccctcaggtgtctcggcagccactgatcagggcctggtgttcttacacctgtggcctggaggatttgtggtgtccacatgggttgggggctgggagcctgagaccagaggagactacggcccatcagtcagacctgcaggcctccgcctccccaggtgggccctggggcttctcttccctgtggggaggggcggtgtctcagccgctgtggccttcagtctctcagaagaccctttggggacctcccgggacagtttcaggtgtgctgtggacgtacctggtgacgggcaggcttccggggactgcgcttggctgggctgtgggacacctttgcgccatctcctttgggggcagagagggacatttctgtgttcagtctttggcctcctaggaggtcactgggaaggcccttgagggtgggtggaccctggccgctgtgggaattccgtgcagctcctgtgttgatggggcagcggctctttcctggcagccgccgcctcttttaacgtatttctcacagtcaccagctttactttcagcgttaaaaaaaaacctcgtgctgaaaaagttgctgaaagttgccccttgctatttacatgatttagaggcttgggctcggcctcagtgcctgctgtttgcaaatgcctcatggaccgggcacccatctctgcagaccttaggccctgggttccccacgttgggccccacctcaaggctggcctgggcttcagaatgttctgggctgaggtccttgcaggggtgctgaggtgcgggtcatggtggacatctcccagctggctggaagagcctcccagggcgggagttggcagggccgagattgagagatctcagaaccatagctgtcttagattattttctggtggtccaggtggaggctgggagggtccgggcagcgcaggccaccttgcagctcccccgaggttctggggactccaggcggtggctgcagagcctcccgggatgtgtctgtgtcctggtctggcttcttggcttcctgggtgaccccgcactgccgcagcccccagaccgcctgttagcaagccttgcagctgtcccacccccgccaggcctcctgctgggtggtgtctcggttgggctgggtttgtctgtgctgcccacgtcttcccgggtgctgtcacattttcatgggtgacacgcagaacctctgtgtgttcttgcgtcatacgcgcactcactgaatgcttaggaaaattaagaggggcattttatcattctcctctttctgagaattaaggacttgccttgtgttttaatccccttcctggccccactccatgcacacggagccggggccgtcgtggctgctgagtggtctgtgcatggcttggctgtgttggtgctggcacagctgcgggtgatctcgtgctagggccctcaggctggcacctctgggcagtcttgtgaaggccgcactggtcatcgtcttcccccaagtggccgttgctcggccaaccagtaactactaaaagcctccccacccaggccctgggctgcgtctgttcagcctggagcaggctcaccctgcacctggggtctggagtgtgctgggggccgggctgtggggtgtgggtcgccaggctcgtggctgctctctggagacgggtcacacgcgttggcagacccctctccgggcctgtgggctgaatgctggcaggggtgctgggctccgtccgtccactgctgatgcgagctgggtgggcttcccttgccttcacccactcaggttggagtagggatggagtcgctgctcctgaggggttctcgggggccaggacgggacttttaattccctcttgagacatcttcggggcctgagtgtgcagggtctgagcccactctgtgatgagtatggggagcatgtggagccccagggcagctcagcgtgtggctcaaggccttctcctgtaggtttttaaatttatttgttcccttgccagaaatgagtatgacacccccaactggccacagttcctgccttaaaatgaccgaggttaaaatgagaaacacagagcttcccttggaggtcacggtacattccagtccaggagagacggagccggtgtctgacttgagtctgtggagggcagcagtgcacccgcccaatctgtgcattcccttctgagcttgatttagcccctctgtttcagtcagtcatgctcattgagaacagacagcaagtgtatgaagcgggtggaggctgattcagcccctgtattgaaaagtcggtcgtgctcattgagaacagacgggaagcgtacgaagcgggtggaaaatcccgcagtccagccattcccttcaaaacatgcctcccagccactcaggaggctgaggcaggaggatcacttgagcccaggaggtcaaggttgcagtgagccatggagtccattgcactccatccttggtgacagagtgagacatcgtttccaaaaaaattctacagaaatgctctatttacaaatttacataatttcctttggaaatagatttaaaaattttttaaggatgaggtaggtaggcaggaaaacggggttctttttggataaaaaaattcacatggccgggtgtcatggctcatgcctgtaatcccagcactttgggaggccgaggcaggcggatcacgaggtcaggagattgagaccatcctggctaacacggtgaaactccgtctctactaaaaatacaaaaaattagccaggcatggtggcgggcgcctgtagtcccagctactcgggaggctgaggcaggagaatggcgtgaacccgggaggtggagcttgcagtgagccaagatcgtgccactgcactccagcctgggcgacagagtgagactccgcctcaaaaaagaaaaaaaaaatcacacacccctttagctctgacacccagagggcccccagcaggaacatcatccccccgttgtgactcccatgggggacctcatcggggggccttgggcagatgtgttgtttcccgttgactgacaaagtcaggatttttagggggaaaatactgagatttgccttattttttaaacattgagatgatggaattgtgagtggtgttttgtttagctgtgtacagtacttgcagcttcatggtgagtgaggccagacacactcagacacggcgatggccccggattttgtgttttaaagtgtttcgtcagcatttttgacttcatgttaacacttgtcttttgaaccaaggttttttctttttaaaacctgatttcctattccctggagctctgctcctgtgaacatgtttttgtgtctttggtggccccttcggcctggtgaagtttccgttcaaacgcggccggtgcccacgtggacaggccgcccccgtgtttgcactcacaggttgcacatctgcccccatggcaggctcacggcatcctttctttgccttcacagagcctgtctaaagacccgggcttgtcaagaggagcatcttcatggtgctcagcaaactactacgatcggagccgactgcagtttgttaagttgatttcatttaacgagtaactttggtgtctgcttactgtaaggactatgctcgggaacttgggagtgaaaaggaagatgctgtcttacctgtctgtgaaacgtgctttgtaagatgtgttccaagtgtaacgtcgttgagtcatgcttcagtgtgccctggttgtgctgagctcagggcctgcccgcctgtgttccaggtctcaccaacggctttgggggtgcgaggagcgagcaggagccgggcggcggcctggggaggaaggccacaccccgacgacgctgtgcctccgagtccagcatctcctccagcaacagcccgctctgcgactcgaggtgggcaccgcggccctgcgcttcccaccacgcagctcccagcaccgcccgccccgcctggctgtcctggaagccgggacattccagctcccatcttagtgttctctgaaaaattctggcctgggattcatgtgtgctctgcccttgtggacagtttcccatgctgcatattaatctgctttatagaattcaagcagaagtaggaaaaacactgcgtgaaataggaacacaattttagaatctgcaatgaagttttacacttgatctttacctcccagaatctggcaatgagcacagccctgcctgtctgccctgtgaaggccactttggcctcctgagtcccccctgccacaggttcactccctccagacctgcgcacccacaggcccgtctggccgcgggggtgtcaggcaggatgcgtggccagcttggtggcggacagctcacgggacgaagcccgagtgaggctgaaggcaggggcggggcgcctgactccctctgctcttcctcccgaagctttaatgcgcccaaatgtgggcggggcaaaccggctcttgtgcgacggcacacgctggaggaccgcagtgagctgatctcctgcatcgagaatgggaactacgccaaggcggccaggatcgcagccggtgagtcgcccggacctgcctccatggctctccacacctcctggttagcgtcttagggctcgactgctggggactggactccggctcagggagcatggtgccctgtgtggagccccaccctggccaacctcccggggaagggttcatcacacaccgaggggctctgggctgtggccctgccggggtgcctgcggaggtggcgcctcctccatcctgccttcgtttccctgtggaacgtccagctctgtgtggctgctggttgccaggcactgtcaaggctgtctggggttgtttaggttcagtggtcatttgcagctgcacaggggactgactgcagggtgggtgccctcaacttcaggcccctgggggagggggaggccccagggtttggggtcgcacagccctcactgtggaaggcagccatgctgtgagggggcatcaggacggagatcccccaggtgggagggacagcagggagctggtctggcggagggggagccaggactttggtttcccatttggggtgtcagttgtgtaaatgaggcaggagcatgctgggagccccgtccttgcggcaaggagggctcagaagggactgtgctgggcacctggagttggagccttgtagcctggagggcaggagcttccctgggtccgtgggaggctggtggccccaggtgggctgcagggacagtggggatgcaagggcctggaccccacaggggaggcagtggtgctgccggggtggctgagaaaggcctgggagctgggctgtgctcgggggacccaccctgttgctgcaccttttgtgggggggcggggcgtgccccgtgtcctgctgacgcctgtgtcctgctgacgcccctctccgcagaagtcggccagagcagcatgtggatctccactgatgccgccgcctcggtgctggagcctctgaaggtggtgtgggccaagtgcagcggctacccctcctacccggcactggtgagtacggctctcgtggcgcctgcgggtccagaggaggctcacacagctgcggggcgggggtggtccgaggaggctcacggcggtggtccaaggaggttccacagctggcgggggggcggggttggtcagaggaggttcacacagctggaaggggcaggggtggttcggcgaggggggcgtgggggtggtctgaggaggctcacacagctggggtggggaggcgggggggggtgccagtgacaggtggggttgtttatgggtgtgagcctcacaatgacctcagcgggtccttctcgtgcagatcatcgaccccaagatgccccgtgtgcctggccaccacaacggcgtcaccatcccggccccacccctggacgtgctgaagattggggagcacatgcagaccaagtctgatgagaagctgttcctcgttctcttttttgataataagagaagttggtgagttgagaggccttagactccggggaccggctggggtggttgggggccgtgggctcggtgacctgagtgtccctgtggtgagcagcgtctttgtctgctgggccctggcacagctaaagtcggaggtgagtgctccgctgtttgcctggtggagaagggcactgcccagccccctcgccgggactgtgggacgggcactgagcaccgggtctgtctctgcccgatggcttcctctccctctcgcctgagccccattggtctggactgtctcttccctactccttacccatgtgtccgctccagtgttgggggtccctctgctgtgctcccggacccctgtactgcaggacatggcccctgcccgggcctggcctctggccctgttcttagagccttctgtcccagcatcatccagctctgctcagacatccaccccatcacaggaggctccccctgtgccctgagctgcttttccccagagcgtctgggaccctcatgtgccagggtttagaccccaagatccctctgtgcaggacacgctggcagcacatgcctctgggaggagctgtggccccggctgtgccctgcgcacgtggcccgggcaggtgcttcctggttccccgtggagctggctgcacttgggacctggcgcaggggctcggggccacctgcctatggtgtgcctggagcaggactggcagcacaggcatccctaccgtctttctcttccttgcctcgacctctgcctctttggccacgtggccactgcttcttgtcaggccttgagcgaggcccacaccttgtccatccgagggcccctttgatggggtctccccaaccaccggcctctgctccagggcccaccctgactctgggcttggtgtgtgcatgtcttgtcactaagcaggcactgggaaacgttttggaggtggaggaggaggtgatggtttttatgccttacttagctccccgtatccccaagtcggggaggggaagggaggggtgcactcctggcctcgggcctgtccctgcacggggcccagctgtcttggtggtgctgagcagggcccctttctatcggagggcagtgaatttgttagatgattacatggagcctgctgaaataccatgtgcaagcaatgattttccgcttgtttttccttttaaaaaggcagtggcttcctaagtccaaaatggttccccttggtattgacgaaactatagacaagttaaagatgatggaagggaggaattccagcatccggaaggccgtgcggatcgcttttgaccgcgccatgaaccacctgagccgcgtccacggggagccgaccagcgacctcagtgacattgactgacggcccggccgccagcgcgggtcttgtccatagtgttgataagctgtacatgtttgtatattgttcaaaacttaacttattctgatttttagttatagctctttaattctttttccccggggaggggggaggttttatttccaagttttctaggaacccatctccgtctgggcgctgtgagtggggtgggcacgtccgggcagcccagtgcgtctgtcgcacgtccccaggccgtgctgctggcgtcactttctttgatatgtagctttttcttaaagacttttgaatgtttaataattttgtaaatcatgctctttacacagagtaccacttatttaataagacgggatgtaaatttacaatgacaaatgtgtattttaagaaagaaaatgacattattttgaatggtactttgtggaaagaggggagaataaagttatgctgtgtacatcacttgcagatcaccaaaaacactccgctgcccgtgaccgccggtgggtgtgtccccgctcccgtcgtcccgcccacctcaaaccccgcaggtgtgcctcccagcggattatttattgtagaaagtgtattcatttgctttataatgaaaaatacatttgcaaaggtatattgatatgcatttttatacaggcacataaaaattcaacttggcttgggagcagaatgcattgcattgtataaatgactctggcctgtgtgtactttgattttataacttgtaatcttttgtttacaatgaggggctttctgtaacttgttttaatttagaacactttggtagcaatagaaactttggatacatttttgtatggtacctgtgatgtatatagaattagtactttatttttatttttaagaggtaaagcattatgttggggaaagtagggtgggtttccaaatttgcattttttatattaaaaataaagtcaagatttggacggtgtggccattttattcctacagccctagacggctaggtgagccccaaggacgggtggggtgctggctgcagggggcggggacacgcctttatcttgaaaactgtcatgggatggcattatttgttatttcacctgatcatatttttattttaaaacttcagttacataaaagttttaaatgctttttttaagcctacaccgtttgtaacatctccatagaaacttggaaatcaagtcttccttagatagttgctgtcctgcatctggcaggtgcttcctatctgtcgtggctctccttcccacagccagccccgcccggcaggcccctccccaccacgagcagctggtggcccccaggatcactcaccgcccacgcagaaaggaagcccacgcagaaaggaagcgggtgcaggagccaggtggggacaggccgtggagcactcagggctaccaccgagaagcccagctaatggcgggtgcagtttgcaccccttctctgccacccacagcctgatcgtgctgtcgatgagaggaatctgctctaagggtctgagcggagggagatgccgaagctttgagctttttgtttctggcttaaccttggtggattttcaccctctgggcattacctcttgtccaggggaggggctgggggagtgcctggagctgtagggacagagggctgagtgggggggactgcttgggctgaccacataatattctgctgcgtattaatttttttttgagacagtctttctctgttgcccaggctggagtgtaatggcttgatagctcactgccacctccgcctcctgggttcaagtgattctcctgcttcagcttccggagtagctgggactgcaggtgcccgccaccatggctggctaatttttgtatttttattagcaatggggttttgctatgttgcccaggccggtcccgaactcctgccctcaagtgatacacctgcctcggcctcccaaagtgctgggattagaggcttgagccactgcgcctggccagctgcatattgttaattagacataaaatgcaaaataagatgatataaacacaaaggtgtgaaataagatggacacctgctgagcgcgcctgtcctgaagcatcgcccctctgcaaaagcaggggtcagcatgtgttctccggtccttgctcttacagaggagtgagctgcctatgcgtcttccagccacttcctgggctgctcagaggcctctcacgggtgttctgggttgctgccacttgcaggggtgctgaggcggggctcctcccgtgcggggcatgtccaggccgccctctctgaaggcttggcaggtacaggtgggagtgggggtctctgggctgctgtggggactgggcaggctcctggaagacctccctgtgtttgggctgaaagcgcagcccgaggggaggtccccagggaggccgctgtcgggggtgggggcttggaggagggaggggccgaggagccggcgacactccgtgacggcccaggaacgtccctaaacaaggcgccgcgttctcgatggggtggggtccgctttcttttctcaaaagctgcagttactccatgctcggaggactggcgtccgcgccctgttccaatgctgccccggggccctggccttggggaatcggggccttggactggaccctgggggcttcgcggagccgggcctggcggggcgagcggagcagaggctgggcagccccggggaagcgctcgccaaagccgggcgctgctcccagagcgcgaggtgcagaaccagaggctggtcccgcggcgctaacgagagaagaggaagcgcgctgtgtagagggcgcccaccccgtggggcgaacccccttcctcaactccatggacggggctcatgggttcccagcggctcagacgcggatcctggcctcgcccgccgtccaggtcgtgcgctctccagggttctgtctcccagggcgcgccctcgccgcggtcctcctta

SEQ ID NO: 6 - DNA, 91472 bp, Homo sapiens
ctgccacctcctccagtaccaatttacccatggccaaacacagggtgatgtgtaggaacctgaaagcacgtctccgacctcagctgcaaaactgtggagtcccacacactagactttatattccagcatttcctctcaccattacatttttgcttttttccatccttacattacctttaccacatttttgtttttcccataattacattagataaggcaatggctagacgtggtcttttactaacttgttctattgggagcggacgagaaaaaaaaaaaagacaaaccctagaaatgtcttcaggtcccagccatgtttaggaaaatacttgaaggcttctgcggtgagagtgctacctggtaagggcgtatggacacacgtggagggcaagaaatgaatttgggtctggtgccgaaacatctttccactgctgtgattttgttttctggtcagagtaataatgctcgttgtaaaataaataaataaataatacataaaaaggaaaaggaaaattcagagaaaatgaaaacaactcgtaatcaacgtgctttttggatgtgaactgctccctttgggagggcaatggagaagtgaggacgcactgggtatctggcccggaacagccggcagtgggtacaccctgcctggtgaattcgaccggggttttgggggacccgccacccaagggccgaagagcagggccgccctacgggcgctcccatttggccacctgagtggcgacttggcgccttcctcggagcagctccggggttccgtcgtcccggttcccactggtcccttacgcagagaccaaaggcaggaaccttccctcgtaactatccaccgactgaaaatagattctgagtccgcccccgcccctccccccttaaaatcctccccactcttaaaatcctcccctttaaagggagccacagggtgacgccgggggagtttgcggaagcgctaaccgcgttggggcctagggcggatcccgtgattgggacaggccccgcccccggctccacttcccccattgtgtgagcggctcgggcctaggccccgcccccctccggaggcccggccactccccttttccacccccccttggctcatttccggccgccgccgctaccgctagcctgtaaggaggattcggcagagggaagaaacaacagccgccatcttgtttgtgtgctaggctgggggggagagagggcgagagagagcgggcgagagtgggcaagcaggacgccgggctgagtgctaactgcgggagccagagagtgcggaggggagtcgggtcggagagaggcggcaggggccgagacagtggcagggggcccggggcgcacgggctgaggcgacccccagccccctcccgtccgcacacacccccaccgcggtccagcagccgggccggcgtcgacgcctaggggggaccattacataaccccgcgccccgcggcgtcttctcccgccgccgcgggcggccccgaacggagccccggggggcgggcgctcccagcacctggccgccggcggtgggggccgtagcagcggccgtatttatttattttccgcgggaaaggaaggcgaaggaggggagcgcggcgcgaggaggggccgcctgcgccgccgccggagcggggcctcctcggtgggctccgcgtcggcgcgggcgtgcgggcggcgctgctcggcccggccccctcggccctctggtccggccagctccgctcccggcgtccttgccgcgcctccgccggccgccgcgcgatgtgaggcggcggcgccagcctggctctcggctcgggcgagttctctgcggccattaggggccggtgcggcggcggcggcgcggagcgcggcggcaggaggagggttcggagggtgggggcgcaggcccgggagggggcaccgggaggaggtgagtgtctcttgtcgcctcctcctctccccccttttcgcccccgcctccttgtggcgatgagaaggaggaggacagcgccgaggaggaagaggttgatggcggcggcggagctccgagagacctcggctgggcaggggccggccgtggcgggccggggactgcgcctctagagccgcgagttctcgggaattcgccgcagcggacgcgctcggcgaatttgtgctcttgtgccctcctccgggcttgggcccaggcccggcccctcgcacttgcccttaccttttctatcgagtccgcatccctctccagccactgcgacccggcgaagagaaaaaggaacttcccccaccccctcgggtgccgtcggagccccccagcccacccctgggtgcggcgcggggaccccgggccgaagaagagatttcctgaggattctggttttcctcgcttgtatctccgaaagaattaaaaatggccgagaatgtggtggaaccggggccgccttcagccaagcggcctaaactctcatctccggccctctcggcgtccgccagcgatggcacaggttagtttcggcagccccggccttccacgttccctttaatcttttctactcggtgcgcctttattcttccattttttttttcttcctctctctctagttccctgccccttaattaattttaaaggtatttgaatgagctggtcgaagacgtccagtagcccaaccattttctttgcctcctaatacattgattgcaacactatgtcatatcggtgtgtgttctggaattagagctcgtaagtgggtgctatatagaaatggcctgtattgttgctctcatgcaatttaatttgggaaatgccaatgcatttgtgtgtaagagctcctatgcaatttaagtttcattttttttgttcttggcaaatgaatttcgaatcctttctctttactgtacttactgtgtttcctctactttccactcttcgaaattttctctcctttgcagaatattttctgttgaggaatagggtgtaaaaaaatcttgattttgtgtgtgcgaggtccaagatttcaggttagaggtgaagtttaacaattcttttatcttacctaccattcttagcttttttttcctttttcttcttatttgctttaagaatcaatatggagcgcagttcatttcacatctcccagttctttggtgtgagaccaaaatgtctgaaactctgggtttttaggttgggagaacaggggcatgttctttgcagtttgcagtcactttctcattttaggggaaataagataaacaattttgtggagttacgtacctggaaatcaaggttagaagttgaaagagttccaatcatgaactacaaacgtgaactgattgtacaaaagtttaaaatgtgcattaggtttggtgtttgtgtgtgtctttgtctttttacacttttaaacatacttggagatcaagattttcgtttaaaagctttacgaccagttcattcagttgtggactagctcctttgtcaggagaagttcagggagacttcttccatcatcccttcattcttttcttacagttagtttaatggtgttatcctgatgggtaaggaccttttctttgctgggataatgaagatgaagaatggctggccatctgacagtccacaagatgttcccctttactacggagcatctctttaactccctgagagcaggctcagcgtcatccctccatctgccagtgagagtgcataatggagttaaatgtaccctttgagtttgtagagaacttcgagagcatgtttctaaataggcttcatttcagagggtgaaaatgggaagacagagctaatgctttgaattcgttgcttttataagaaagatgtgaaatgaatttaagttaacctgcaaaaattgagaagtaggaatcttgcgagttcctctacctaaggcttgtaacattgattatgcatgaactttgatctgtacctattctatgaaggtactgtagtctccagggatttttttagctggttttttccttcagaattcatacacatacacaaacgtcgttgtattcctttgcacctactaaagtgccattcagaaacattttttagatcatctttagagacttaatcacctgtagatttttgtggtgtttctttcgtatttgtgtaatgtggtagtttttgctttttagttttggtgtaacgtggtagtcgattttacattggagttagccagtgacttggaacgtaggggaaacttttttgtgtactttgagtagtcctgatttgagcagtttcgtcttggagctgtattgtttaaatacttctgttcaggtgtgctactactttctccatgtcggtctgttttgctacttgaaatatctttgaataattacaagagttttaaatgtgttaagtgggcttttatagtttaaaaaaaaactcaacattgagattaattcattcactcataatgctaagagtttatcttagttacttttctaaattttgtaatgagggttaactttacccccctccccaaatcaagattctactccaggaattctttggtgtacggtttttaattgtaaccagtctgggtttgggggaggggagaagtgagtataaagaaaatactgtccctctgttaacttacttcaagttgggtaccattgtaatttttttttttttttttttttttttgagatggagtctcattctgtcacccaggctggagtgcagtggtgcgatctcactacaacctctgcctcctgggttaaagcagttctgtctcagcctccctagtagctaggactacaggcgcagaccaccacgcctggctgatttttgtatttttagttgagacaggatttcaccatattggtcaggctggtctcgatctcctgccctcaagtgatccacccaccttggcctcccgaagtgctggggttacaggtatgagccgcccggccagaggtaccattatatcttgaattttttttttttgacattctgcagtttgtaatatgtttgcaggtaacttttattggaggcacatcacctcttaaaacttttaagtttcaaacttgtaacttttgatttttgagttgtcacttgggtattttataaatgtgaaagaaaattatttcttgatattatggtttttgtctagaactggttgaaataagcccgaaattctagcacctaaaacttttttaaaaaaagtgatttaggcttgcaaatttcgtgatgtaaatatatccaccaagagcgttctaatgtcagctttaaaggaaagaaaactggaatccaatgggatgacatgctaaagtgttacaaatcaaattattacttaaatctcaacctctgaattgctgtttaatactcagatattctcctaaaaaatttccaggttgattcaaataacttaggttaaactcaacttttacgtgttgggatggggaagagaagacttatttgtagccttcacacctttatgttcctgtttcagtatttgcatttgatccattgaaatttttatttcatttggtatggttagggtaaaacaaatcatttgagaaatgacattttgttctccctctccctccaaaaaaaaaagattatgaaagccacttgtaaactttttttgtaaaaatgaccaaaagactggaaaagttaatgttaggcaaatcctggaaatatcttttggagctgtttctgatcatcttgagtgatggaaatgatgagggtcatctgttgtcttcattactcagtgaacacgttttgtcactgcttggtaaacgcttaatgccgtatgcacttaaaaagcacctggaaagataggattttaggatctggcatataattaagtagggtaaagatccttctggtcttggtacagttttgtggccctgggttttgtgcttttttgttttttgagtttttcccccatttcaaagacacagggcagatagtgtgtaaagtatacctgctttttgaccagtagattaatgtacacagtggagaagtggtaaggctttttaaaatgtcagctctactttttttttttttttttttttttgagacagaggtttgctctcgttgcccaggctggagtgcagtagctcgatcttggctcactgcaatctcaacctcccaggttcaagcgattctctgcttcaccctcctcagtagctgggattgcaggtgtccacaaccatgcccagctaagttttgtattttttagtggagacagtatttcaccattttggccaggctggtctcgaactcctgacctcaggtgatccacccgcctcagcctcccaaagtgctgggaatacaggcgtgagccaccatgcccggctgtcagctctattttcttaaaatgccattgtgttagtggttcgtcatcctaaccaaaacattttgatcaagaccatttattttccagctctgtaacttgtgatatgctatgttttattttattttggcttgaatgtttacataagagtttgcttctggagtcttgcagatatagctcctgatttagtgaggcatttctctcctcagtattaaattgcaaaacattttactaaagtgctttaagtttttctggcaattattctcaaggccttgtaagttcatttataggacttcaagaaggttgtctctggttgatagtgagataaagtgacttttaagttgtaaatcttgaatgcgttacaatatgggggtcttattccagcaggagttcatcttctatagcagaggttggaattgtattggcatgtccagtgaatggataatagggaggagggaggaaagggtttctgccttggtggccttttggcattattttgtgtttttctttgcttttctctctcttctttatttaataaaaacaaaaaaatggaaacagttgaaaattaatgcaaagtggtatttgtagggacattaagtggtaaataggaaagagaaaaagagtaggaagagtgttgcagatacaagtgggagtgtaaaatactttttcctggtatatttacaaaaacaatttgagagttattctgccaattcatatacccagcaattaatggaaaagtaaaagatgctagttttatgtttgtccagattttagggtttccttctttgaagatttctaaagttgaatatttttttaagtgaggcaagcagtaaaattaatgggcaaatgaaaccaattataccaagtctaaaatttttcttttttttttgaggcagagtctcgctttgtagctgggactacaggcgcctgccaccatgcccagctaattttttgtatttttagtagagacggggtttcaccatgttggccatgatggtctcgatctcctgaccttgtgaacctcccatctctgcctcccaaagtgctgggattacaggcgtgagccaccgcgcccagctaaaaattttttttttttttaatacttttaagttttaggatacatgtgcacaacgtgcaggtttgtcacatatgtatacatgtgccatgttggtgtgctgcacccattaactcgtcatttagcattaggtatatctcctaatgctatccctctcccctccctgctaaaaaattttttaacattgaacttcgcaggtgattttttttcgcttaatagacggtagtttcattttgaaattttcatgggaaattactgctcactttcccagaagcgcttaagaggataaataataattgaggtgttaagcctcttctgagcaatttggatataatttgtttttagatctagattcttttttataaatgtcccaaagcaattagaagtgattgttttttttgagacggagtctcgctctgtcgcccaggctggagtgcagtggcgcgatctcgggtcactgcaagctccgcctcccgggttcaagccattctcctgcctcagcctcccgagtagctgggactacaggcgcccgccaccacacccggctaattttttgtatttttagtagagacggggtttcaccgtgttagcaaggatggtctccatacactgacctcgtgatccgcccacctcagcctcccaaagtgctgggattacaggcgtgagccatagcacctggccctagaagtaattttgttgagagagagagagtaaaactaaaagtactgaaaagagtaagagagtagctaagagaatgagtattggagtcagactgctagagttcatagcccaggcttgtatttattaactgtgaactttgggccaaatacttaacctggctcaacctcctcacatttattcctaaccacagccctgtaaggtgggtgcgcaccttataggaatccaccttacttacccaccttacaggattgtggttaggaataaatgagaattctctttatcagatgcttaggactatgcttgcttctgtgtagtatgtgttcattgttaactgtttttaactttactgctaaatatatcagaaggaaagcagtggtagatggtttgggggttgtttttgtttttttgatttgcaacgaagtcttgctctgttgcccaagctggagtacagtggcgtgatctcggcctatgacaacctccgtctcccggcttcaagcgattctcctgctcagcctccggagtagctaggactacagctgcgcagcaccatgcccggctaatttttgtatttttagtagagacagggagtcctgacctcgtgatccacccacctcggcctcccaaaatgttgggattacaggcatgagccaccgcgcccggcctgtttttgtttttcgtggatatacagtagtccccccttatccttgcgggatacattccaagatctccagtggatacctgaaaccctgtatagtagtgaatataattgtcatcagtcagaacacgtttctgtccgtgtcttccacacacaaatttaatgccttttccatcttaactaatcacttgtcatgcactgtggctgtgatgtttgcagtttgaggtacaacagcaaaactatcacgaatttttttccttcacaatttcatgtatagatttgatctttgtaacctccgcatacaattttttttcattccttattaagtcaagaactttcaccttcaagcaatttacagcttctctttggcatatccatatagctgtcattgctacttttggacttagggactgtcattaagtaaaataagggttacttaaaactcaagcattgccctgccccatagtcagtctgacaatctgataactgagatggctactaagtgacaaatggctggtagtttatacaggtgaatacattagacggaggggagattcactacccggtcaggtgagatttcatcaggctactcagaatggcgcacagtttaaaacattgttgtggctcacgcctgtaatcctggcactttgggagattgaggcaggaggattgcttgaggccaggcattcaagaccagcctgggcaatgtagtgggaccccccatccccccaccatctctagaaaaaaaatttaaaaagtcagcaaggcatggtggcatgcatctgtagtcctagcttcttgggaggcttaaggtgtgaggatctcttgagcccaggagttttgaggttacagtgagctatgatgacaccactgtacactccagcctaggtgacatagcaagactctgtttctaaaacaacaaaaattagtgtttatttctgcagttttctttgtaatatttttgtaccacaggtgtttgaaatggcagaaaatgaaacggggtaaggatgaactcctgtatagatagactggataaagagaaagccaagtgcatgatgttcatagaggagtcttaagagtaagccttatgtcatctatccaaatgttgttttctaggagtataagaatataggaacagagcttaaaatggaaaaatactgtacagttagccttccgtatctgagggttccgtgtttgtggagtcagccacagattgaaaatatttaggggaaaaaaatccatggttgcatctgtactggacatgtacagactttattttcttgtcattattccctaaacaatacagtgcaccaactatttatgttgcatttacactgcattaggtattgtaaataatccagaaagaattcaaagtatatgggtgggtgtgtgtaggttatatgcaaatactacatgtcccctttatatcagggactggagcatcctcagattttggtatctgcagtggagggagtggattctggaaccaattcccagcagataccaagggacaaccatatatatatagtatcatgacatcttgtatcatgtcacgtatatatatatcatatatattatcatgtcacgtatacaagacatcttatatatcctatcatgtaagatgtcttgtatacgtaagtaatagaaatgaaaatcagcagatagttaaggcataatgagaaaatggaaaacattgttcttgttagaaatgtttaagaatggcttcttgataaagaactgtgttaagcatattctttcttctttttagacacagagtctcactctgtttcctagacaggagtgcagtggtgcaatcctggctcactgtagcctccatctcctgggttcaagctattctcctgcctcaacctcccaagtagctgggattacaggcacctgctaccatgcctggctaatgtttgtatttttagtagagatagggtttcaccgtgttggccaggctggtctcgaactcctgacctcagtctgcccacctcggcctcccaaagtgctggtattagaggcgagagccacagtgcctggccaattaagcataattttttctatttttcattttcttacatggatctttttttttttttttgagacggagtctagctctgtcacccaggctagagtgcagtgacacgatctcggctcactgccagctccgcctcctgggttcatgccattctcctgcctcagcctccctagtggctgggactacaggcacccgccaccatgcccggctaattttttgtatttttagtagagatggggtttcaccatgttaggcaggatggtctcgatctgctgacttcataatctacccttctcggcctcccaaagtgctgggattacaggggtaagccaccgtgcccagccacctgggtcttaaagaataaattttcttgagatggagtcttgctgtgttgcccaggctgaagttatcctcctgcttcggcctcctgagtagctgggattgcagatgtgagccactatgcctgcctctaagaaactttcttataaaggaggaagaagaaaagtagcagtgcagtgctccaaagaatttttttacaacacttaaggaagaactacctttaacttgtagcactagagactctgtttcaaagaatgcacaagaatacttacccttattacttgtaatatactctcatattttctgttgcttttttttcttttctttttttttttttttttagtactggttgcagcctactatattgatttttatgacccactgttggcttttgagccataatttgaagaatactggcgtagaagagttgacaagatggcagttattctgtattaggccaacattttctgtatgccaggaacttatcctctgtacattgttccttctttccttcctggagtttatagataagggaagaagactggcattcacggagtctggtgtgatcagcattgtatttgggaagtacgtatatagtgggaggaacaggagaacctaacccagtagttatcctggtggctgtctttgaggaattgtgtctgattttgggatctcacagatagagataggattagtaaaaatgagcccaggctagaaaggagactgtgtgaggccaggtatatcctgttctgggaacctgtgagtgctgtctgactggtagaatagccaaaaacttgactgtagaggtgagcaagggggccaatcatggagggcttataatacaggaatttagactttccattttacccatttaatggatggggcagaattgtgctttaggcagttaagtaaaaggaggaatagtttgggaagaacagggaaaaacaggaggcagggagaccagtgaaacagctgttttagggttccagccacccttaccacagaagatggaaagaagtggaaagatttgagggaagatggatgatcagcagaacttggtgactgattagaagttaggtagtaagatggacaaatcaaggataattccccagtttaaagtttgagcaacttgttgggtgatgatttatttattatttatttatttattttgagacaatctctgacccaggttggagtgcagtggtgtgatctcagctcactgcaacctccgccttccgggttcaagcgattctcatgcctcagcctcccaagtagctgggactaaaggtatccaccaccacgcctggctaatttttgtatttttagtagagatggggtttcaccatgttgatcaggctggtctcgaactctggcctcaagtgatctgctcgccttggcctcccaaaagtgctgggattacaggcatgagcagctgtgcccagctggataattatttaataaattggggagcataggaagcatagtatttgtgaagtgggtaggcaggtgtgatgggggtagtgatgttacatttggggcattttgaagttggtggttcttctgagttgagcagtcagtcactcttcatttgctgcacctttatctcattttagccaacagacattgaatacctaccaagtcttaggtatttgcaatgtaaagacaaattaaggtgccttctgctgtcagagacttcagagatacagtggggttggtatacatgtccacacagttttcccgtaagttatgctttaaaaggttttttaaatgttatatataaaggcaggggatgggttgcttttgacagagtaggtttggagcgttgatggaaaacttcatggagaaaatgtatatttgaacagggttggtggaaattaacataccttagaagtagggaaagttggaagggtttttcagatgaagctaacatgtttctgatgtggctagaatatacgctgtgtgatagggtttttcatgggagagagatgggaaaggatgttggggttctattgtggaaagagaaatatgctaaggaatttgccatttatcttagcatcaggataagaattgtatgagcaggggagtgacatggttggggaaagactaattctggtaacaccgtacagagcagcagtaggtagaacctatggcaggaagactaggagtacattatttacctcttttgaaatgagtttgtcatttgccttggaagtttttggtacattgtaattaacaaagtgaattgtttattttgttcaagatccatgcttggtttgccagttgttataaatgtagaaaatataccagataccaacttagaaaccattcactctccttgttatttacagatatgcaaggtttttttgttgttgtttttgttttgttttgtttttaaagggtatgtttctccatctaggattccctgtaggccttcccttgtaacaaatctcaaggtttgctcaaaatcaagaaatgttcagtgacagttaagttagcacacaatttaggcttactataaaacatgtccttgagttgattcttaaggtgggattttaataaataatagtgtcttcatcatgtagtttttttggtttttttttttcatacagagtcttgctctgttgcccaggctggagtgcagtggtgtaatcttggctcactgcaacctctgcctccccggttcaagtgattttcctgcctcagcctcccaagtagctgggattacaggcgcccgccaccacacccagctaatttttgtatttttagtagacacagggttttgccatgttggccaggctgacctcgaactcctgacctcaggcgatccgcccgcctcggcctcccaaagtgctggggttacaggcgtgagccaccatgtccggcctcatgtagttattttcacaagaagtgtcactatattaatacattgaaaaagagcaaggtgaattgtcaatgtgaattttctaaacatggccccaggtcacattcttgatcaattaaagcacttcacctctttaaaattcaagacttaaggctgggcgcagtggcctacacctgtaatcccagcactttgggaggctgaggcaggtggattacttgaggtcaggaattcaagaccagcctggccaacatggtgaaaccccatctctactaaaaatacaaaaattagctgggcatggccgggcacggtggcttacgcctgtaatcccagcactttgggaggccaagacgggcagatcacgaggtcaggagattgaaaccatcctgggtaacacggtgtaaccccgtctctactaaaaatacaaaaaaattaaccccgtctctactaaaaatacagaaaaattagccgggcgtagtggcgggcgcctgtagtcccagctactcaggaggctgaggcaggagaatggcgtgaacccaggaggcggagctagcagtgagccgagatcgtgccactgcactccagcctaggtgacagagcgagactccatctcagaaaaaaaaaaaaaaaaaaaaaaagccgggcgtggtggcaggcgcctgtagtcccagctactcgggaggctgaggcaagggaatctcttgaacccgggaggcggaggttgccatgagctgagattgcacctgggccacgagagtgaaactgcatctcaaaaaaaaaaaaattcaatattgaaatgttttgggtttttttgtttgtttgtttctttttttgagatggagtctcactctgtcatccaggctggagtgcagtggtgcagtctccactcactgcagcctccgcctcccgggttcaagcgattctcctgcttcagcctcctgagtagctgggactataggcacatgccaccacagccggctaatttttgtatttttagtagagatggggtttcactatgttggccaggctggtcttgaactcctgacctcatgatccacccacctcggcctcccaaagtgttgggattacaggcgtgagccaccacccctggcgtgttggggtttaaaaagaataaacttcaagttaatctcttcccaaagtataagtataccttttgatgtcatgatagcaggaccatgtgaagagtacatattttgaaatttgcttgcacttttgccctttcactctattggatttcaaaattcaacagctgtcagcatttgtagctgtgtaatcctgtataattatcatcttttatccaaatttgtataaaacttacaagttttcctaatttttttggagtattagagatcttgcctgtctttccagcatggatattttattttaattttcttaatgttccttcaaattacgtagtttgaaatgtttgtacatctttatttccttgctagatgggttgtttatatgattagataattcttcatttacagagggttaaagtaactttttttaaatgaagtactgaatagaggttaggaaagttgttggaacctgataaatttgtaaaatttacaaaatttctcattttaaaagctacagttttaaaatttcatgctttttaagcatccattgtaagagtaggagtgtccaaaagcaataagaacaagaaatctttgtaagattggtagtttcagtgtttagccaaaccattatcagaattagaatgactaatgttatgtaggtttggttttcaactccattctttttttgtttcattttttaaaaaattccaaatctctaacctggccttggcgctctgagtcttctgatctctgcccacctcatcactcactttgttctccccattttgtttatttcaattgctgaactggctgagcttttactctccccaccttaggttgttccactcttcatctgtcaagctcctactcatcctgtggactcaaccactgggttagatgaaagaaaagtttgacgtgtccactctttaaaaacattaagtgttttttgttgtttgtttgagactgtcgtccaggctgtagtgcagtggcgcaatcttggctcacggcagcctcgacctcctgggctaaatgatcctcccacctcagcctgtagctgcaccaccatgcctggctaatttttaaatttttttgtagaggcagggtcttgctatgttgctcaggcttgtctaaaactcctgggctcaagcagcctgccttggcctcccaaagtgccatgattacagttgtgagccacctaccaggtctggcctaaaagcatttttttatttttattttttgaggtgggatctcgcactgtcacccaggctggagtgcagtagcgtgatctcggcttactgcaacctccgcctccaaggttcgggtgattctcaagcctcagcctcctgagtagctgggattacaggcgtgcaccatcacccccggctcatttttgtatttttagtagcgatggggtttcaccatgttggccaggctggtctcaaactcctgatctccgccagcctcggccttccaaagtgctgagattacaggcatgagccacggtgcctgacctaaaagcattttaatgccacagagaaagccagctaaagggaggaggagcagtagatggattctgtcttctaagtgggatttgagaattgactggattttaaataattaataaaggtgttttacttaatgaacacagtttaagagaactgagttgattttacttcattttacctaaagtacaaaggtaagtgtgtttactcaaataatatgtgagccttttaagtaaaaaaaaaaaaaagtgtaactgtgagagatactaatatagtagaattagattttgagccaaaattgttttaattttaaattacattttgtgtcatagttaagtaactagaaaattgtctgatttatgttcatagtacagtgtttgggattatatttttaatggttctaattttgaaggttatgcttcatttatatataatacttcatttgttcaatttctcacgtatcattgaattattttgatcctttgatttttggaaaggctaaatgaaccgagattattttttatttatttatttggagtttggcttttgttgcccaaactggagtgcattggtgcagtctcggctcactgcaacctctgcctcctgggttcaagcgattctcctgcctcagcctcccaagtagctgggattacaggcatgtgccaccacacccagctaattttgtattttttttttgtagagacagagtttttccgtgttagtcaggctggtcttgaactcccgacctcaggtgatagcttgcctcggcctcccaaagtgctgggattacaggcgtgagccaccacgcccggccaccgagtttattttataagggattatatggttacatctgttgcaaggagcaaaccacaagcaatatagaagacaacaagggtgatctacagaatcagtatgtgataatgaaaggatgttttgactcaacactagtttccacgtgtttaatccaaactcagttgttgtttaaattgttaaatttctaatacacggtccactgggtaaaccatgtattaggctaaacttttctttttctttttcttttttttttttttttttttttgagacagggtctcattctgtcgcccagtctggagtgcagtggcgtgatcatggctcgctgcaacctcaacctcctgggctcaagcaatcctcccatctcagcctcccaagtagctgggactacagatgtgcaccaccatgcctggctaattttcgtatttttttgttgacactggtgtccttctacattccaggctggccttgaactcctgcgttcaagcaaccctccagccttggccttccaaagtggtaggattataggcgtgagccacggtgcccaacctatgctaaacttttcacatcagatttatatgtgtcctgtcccgttttacttcaccatgattggactcagtgtacactcagatgaagaaacttcaaaaaaaaaatactgctccttgtgaagcagaagaaagattttactgaaagtgatgtttgtattggagcatcattaaaggcataaaggaacttgtgaacaaactacttggtagaagcagcctggtgatgttgattggttgatactttaggaagcgggaaatgtcttactggagatagttccttcatttcaacagtcatttgtgatactgttttttaatatttgccataggatagttaaaaggtaatggaacaaacttcagatttataagtttttaattaaatataaagggggcaaaagtagataaatatcttaagagctcaccttactgtctagaaaaaatacttgctggcccagcgccgtggcacacatatgtaagtaatcccagcactttgggaggccaaggtgggaggcttgcctgagcccaggagattcagaccagtctgggtaacatggtgagacccccatctcaacaaaataaaaaattaggtgtggtgatgtgtgcctttggtggcagctactaaggaggattgcttgagccaggaggtgaagctgcagtgtgctgtgatcccgtcgctccactccaggctgggcgacagagcaagaccctgtctcaaaaaaaaaaaaaaacaaaaaaaaacggaaaacataagacagcaatcaaatacaatagatttggcttcagtaaatgaaaaccctcactgtaggccctagaataacaagacttctatattactaaagctgattactgcttgatgaactctgtacatgtgatgtgactagtatgaacttctgaggttgttgagatgaatgagaataaacgtgaggtgccaagaaaaatgcctgacacattgaaagtgctggataaatgtatgctgtcatcattgtaagctgggctatctcctaatagtgtaatgagtccattgaataacaataggtaacatgtttatagtgcttagtgtgtgccaggtactgttctaaacactttacatttattcactcatttaatcacaaataacatgaagtaggcactttgctgttatgcagagatggaaacaaggttatccctgcatcttttttttttggcagggggaggaggacgggaacggatggagttggtttttttttttggagcttctgagacccaagcttcaggccatgctcccccaagcacctccccaccaccaccccccaagatgtagtcttgctctgtttcccaggctggagtgcaatggcgtgatctcagctaaacggaacttctgcctcccgggctcaagcaattctcctgccccggcctcctgagtagctgggattacaggcgcctgccaccacgcccagctaatttttgtatttttagtagagatggggtttcaccatcttggccaggctcgaactcttgacctcaggtgatctgctcgcctcggcctcccaaagtgctgggattacaggtgtgacccactgtgcccatcctgttccctgccccccccccctttttttttaagttattgagacagagcctcacttggtcacccaggctggagtgcagtggcaggatcatagcgcactgcagcctcaacctcctgggctcaagcaggccctttgagtaactgggacctgtaggtgcatgccagcatatccagctaattttttttttttttttttttttttttttttttttttttgagacaaagtctcactctgttgcccaagctggagtgcagtggtgtcattgcaacctccacctctcgggttcaactgattctcctgcctcagcctcccgactagctgggactacaggcatgctccaccattcccggctgatttttttatttttagtagagatgggatttcactatgttggccaggctggtcttgaacacctggcctcaagtgatccacccgcctcggcctcccaaagtaaagtgctgggattgcagatgtgagctaccacatccggcctatatccagctaatttttaaaaataatatttttgtagagaggtggtctttctcccctcggccttccaacgtactaggattacaggcgtgagccacccttctggctgtcttttcctttttattttttcacacttccagtggtccttgggatctgtgtatactttagaatcatcttgtccagtttcttgacaaacttctagaagtttgattgatactgcattgaatctatagatcagtactggggaatgatgtttttaatactgaggatttctaagtgtttgagatattctgtttagtcagcctttacttttgagtttacacctgttttatatacattgtcagtttttccctatgttataaatctttttttttttttttttaaatttgagatagagtctcactcttgtcacccaggccggaatgcagtggtacaatctctgctcactgcaaactctgcctcctggatgcaagcgattctcgtgcctcagccttctgagtagctgggactacaggcatgtgccaccacgcgcagctaattttggtatttttagtggagaccgggtttcaccacgttggccaggctggtcttggctggtcttaaactcctgacctccagcagtccacctgtctcagcctcccaaagtgctaggattacaggcgtgagccactgtgcccggctctacattatttaaaaaattatttgtaaccatttgttgctggcatacagaaattcactttgatacgtttatatttatggtataaccagtcatcttgctaacctctcacaatttccagttgtatgtatttctttaaaattgacaacagttgtgtatattcatgggttatagtgtgatgatatatgtatttgctttgaactttctatgtcaacagttatattatctacagacaataagttttgtttcttcctttttcctttttctttctttccttcttttttgttttgagacggagttttgcttttgtcacccagggtagagtgcaatggcactatctgggctcaccacaacctctgcctcccaagtcaagcgattctcctgcctcagcctcctgagtagctgaggttacggcctgcaccaccacgtaccgctaattttgtatttttggtagagacggggtttctccatgttgctcaggctggtctcgaacacccgacctcaggtgaacgcctgccttggcctgctaaagtgctgggattacaggtgagaaccaccatgcccggacttttttctctttttttttcttttttagaacttgtaacctttttttttttttttttttttttttttttgagacagagtctcactctgtcgcccaggctggagtgcagtggcgcgatgtccactcactgcaagctccgcctcccgggttcacgccatcctcctgcctcagcctcccgagtagctgggactacaggcatccgccaccgcgcccagctaattttttgtattttttagtagagacggggtttcactgtgttagccaggatggtctcaatctcctgaactcgtgatccgcccgccttggcctcccaaagtgctgggattacaagcgtgagccaccatgcctggccacctatttttttatgtgtgtgtgagacagtctcgctctgtcacccagcctggagtgcagtggcactgtctctgctcactgcaacctctgctcccctgggttcaagcgattccttgcttcagcctcccaagtagctgggactacaggcgcctgccaccacacccagctaattttttgttttgttttgtttttagtagagatgtggtttcgctatattggccaggctggtctcaagctcctgacctcaagtgatctgcccaccttggcctcccaaagtgctgggattacaggcgtgagccactgtgcctggccaagatgaatcttatattttctttatcctttgttactatggcgaatgacagtttatagatgttctggtgtcccctggattcctgggattatcccaacttgatgatgatttttgagcctttggtttgctctttttaaagagtcttgtttctgtgtccatgaagaagattggcctgtgtttttcttatattggccatgtgtaatttttatattgttttttttttttagaagtatttgtgttagcttgaattgtattttccttgaaagtttggtgtagggcatgcctgtaaacaattcggatatggtgctttctttatggaaagattaaccaagggcttattttctctagtagcagtaggattacagtggtctggcttcccatgtgcctattacccagcttcaggtttactagtatattatactacccttccccccttttttgctggagtattttaaagcaaatcctagccatgtcatttcaccagaaatatttcaatgtatatctttcagtaaaaaggatttattttaaaataatgccattgttatagtcaataaagttaatgatttcttaatatcacccatttctcagtctgtacctaaatatgtcttactctcatttcaaaatgtgtgtttatagttggcttgtttgaatcaggattccaccccccccccaacttatgctatggatttgttggagaaactgggacattccatatcctatatgatttcttttttattaaggtttgagtattttctccggaatttatttattttgtatgttttcttcatttgtataaagttgatagtattgctttatcttttaattttctttttttcttaaccttcttgaagttcgtcttttgttactccaaaaaactaacttctagttttggtaatgctgttacattcctatttcctgtttcgtttatgcttttgtctttgattgtcttcttcatattaatactatttttctaatataatttggatacttaattcattattagcaacctcaggagactcactggagagttcattaatttgtaactttatttattattattatttttttgagacggagtctcgctctgtcgcccaggctggagtgaagtggcgtgatctcggctcactgcaaactctgtctcccgggttcatgccattctcctgcctcagcctcctgagtagctgggactataggcgcccgccaccacgccctgctaattttttgtatttttagtagagatggggtttcaccgtgttatccaggatggtctcgatctcctgacctcgtgatccgcccacctcggcctcccaaagtgctgggataacaggcgtgagccactgcgcccggcctttttaactttattttctaacataggcctttaggttttgaaatatattttttattactcaatttcctttgtgatttcttttgtaatttatcactgcctgtttttaaaatttctaaagtggagatttttttgccctctatgttcagtatgctaatgataaaatattttcttggatactccaggggaaaagtaaaaattgcaaataaagtatgatctcagttttgtaaatcacgtaagtataaggaaataatgaaggaactatatcagtatattaagcaggcatttttgaatagtggttttaggtcagttttgttacacatttgggtatttgttgttgttgttgttgttgttgtttgagataggatctcgctctgtcacccaggctagagtgcagtggtacattcacggctcactgcagcctcaacttcccaagctgccgctatcctccttcctcagcctccctagtagctgagaccacaggtacaggccactaggcctggctaagttttgtatttttttgtgcagtttggttttctccatgttgcccaggctggtctgctgagctcgagccgtctgccctccttggcctcacaaagtgttgggattacaggttgtgagccaaagtgctcagccttgtggcacatttttgatggaggagcccatatgatatttcaaaaggaaagagtaattctgtaaaactctggactctaaattatgccctgagatcttgggatacaatttgacttagttcatatatgaccacatgttggtttagttaatatatgaccatgtgcttactatgttgccagtaggcaaggagctggtatataagtggtaaaacatgtccttcgcgaagaatgcatggttggagtgaggggtggtcacaagggatggcaaggggaggagaggaggcaaacccagagataatttcagtgacatgataaaatgctaaaagatacagaaggagcaggattgggaagaaaaaaaaaaactacaagaagaggaagggcacatacaggaagagttatacttaggaactaagattaattggatcaagtagaccattaaggcaatattttgtcttcaagggatggtccattttttaagaggataatagctgtggaatttttgttgttgttagtagacaaggtctcacagtgcccagacttgatgtgaattcctgggctcaagctatcctcttgcctcagcctcctgagtagcttggactatagatgtgtaccactatgcccaacacccagtaatgcctttttaatgtgaaaactactttagagaattgaaaggaaagaaaactcaaataatttttatagtaggttaatactgtcaataggtcaatcaggagtaattttcttcccccaggggatgtttggtgatgtctggagacagttttgattgtcacaattgggatatgggtgctactggcataagtagaaagaccaggagtctcctaatgataatagagggcacaagacaatcaccctccacccacaacaaagaattatcacatagctcaaaatgttaatagtgccagggttgagaaaccctgcattaatctatacttagcacccagttttgtttgttcttttttgagacaggatcttgctctgtcacccaggctggagtgcagttgtgcagttaaagctcactacaacctcaaattcctggactcaagtaatcctcccaccttagcctcctgagtggctaggagtatagcctagtgccaccacacccagccgactttattgtttgtagagacagggtcttgctgtgttgacctgggctgaagaattcctcctgccttggccttctaaagtactgagattacaggtgtgagctaccagggctggtcttgcaccctgtttttggtaggggtggtttgtatggtgaaggagccagaggcatggtgttgtaccctattctggctagactttggttaaggaaagctattctgtaggctacaggtcaaaaactccgcctgttaaaggcctactttgaggcaggtactatataggaacttggtaaaaaatggtggatagccctctgcttaactggagcacacactgagtgttccacaaatgacaggtcttttgtatcagttgtgtgtctttatgtattacaatatttaaaatgttttctttccatcctgagtttagtttgtgtgtagatattttaactgttcttctaaggaacttgggaatattaatacagcttaattgcatttcttttttccatgactgtggatacaaacctttagctagcaactcatgtaataatgggtgttgcactttttttttaacaaaaaataaaattttatttcaactattatgctaattctataacattatttagaatgtttttctttttttaattatcctttaagttttgggatacatgtgcagaacgtgcaggtttgttacataggtatacatgtgccatggtggtttgccgcacccatcaatccgtcatctacattaggtatttgtcctaatgctatcctctcctagccccccatcccccagcaggccctggtgtctgatgttcccctctctgtgtccatgtgttcgtatttaactcccacttatgagtgagaacatgcggtgtttagttttcttttcctatgttttctgagaatgatggtttccaggcttcatccttgtccctgcaaaggacatgaactcatccttttttatggctgcatagtattccatggtgtatatgtgccacattttctttatccagtctgtcattgatggggggtgttgtactttcaatcccttttttccttggtcttattttaggtatagttcttaagtgtttaagtttgttgatataaccaaatatcccctcaatttaaaaaatctataaaatggttttagtatgacctaaaaaactaccatacaaatagtatatatatagggctgtgtgtggtggctcacacctgtaatcccagcactttggaaggccaatgcagacagatagcttcagctcaggagtgtaagaccagccaggtcaacatggcaagctccgcctctactaaaaatacaaaatttagctcggtgtggtggtgcgcacttgtagtcacagctacttgggaggctgagatggtagaatcacttgaacctgtggatagaggttacagtaagccaagatcgcgcaccactgcactccagcctgtgcaacagagtaagaccctgtctcaaataaatagaaaaacatggagtgaggttgggaaatgacatttaatgcttattgagaacaatatagagcagttttttattttggttttgtcatactttgacctttgtcttttccctttgcttttagattttggctctctatttgacttggagcacgacttaccagatgaattaatcaactctacagaattgggactaaccaatggtggtgatattaatcagcttcagacaagtcttggcatggtacaagatgcagcttctaaacataaacagctgtcagaattgctgcgatctggtagttcccctaacctcaatatgggagttggtggcccaggtcaagtcatggccagccaggcccaacagagcagtcctggattaggtttgataaatagcatggtcaaaagcccaatgacacaggcaggcttgacttctcccaacatggggatgggcactagtggaccaaatcagggtcctacgcagtcaacaggtatgatgaacagtccagtaaatcagcctgccatgggaatgaacacagggatgaatgcgggcatgaatcctggaatgttggctgcaggcaatggacaagggataatgcctaatcaagtcatgaacggttcaattggagcaggccgagggcgacagaatatgcagtacccaaacccaggcatgggaagtgctggcaacttactgactgagcctcttcagcagggctctccccagatgggaggacaaacaggattgagaggcccccagcctcttaaggtaagtacagttttggtttgtgtgcacaatcggcatgcatgtgagtattgtcatgatggatggagggtttgccttacattgtatagcagtttccactattacacgccaggaatttactgtgctgtcataagttttaagaagtgcctgtatttaagtaaaacgtttattttacagctggtattctataacttcatacttccaaatgattgctggctaatgctggttctctctggcacaagtattggaatgtttttatctcatttccaagtccagtttagccttgtagcctccttataaaattacagttttgagatggctggcattacactgtcttcagatggatactccatttgttcctattgctttgaatgtccctggttttcaagagatacatttattctgagaaatgtattaactgttatttttctttattggttgatggaaattaaggtgcatttgttcatgtgaaacctcaacagtgtagatgtttcagtgaaccagaacttggccaaagacttctgttagctttattaactagagaatgctaagtatattaaaaatattttaaacttttaaatgtggatcctgtatacataaataaggcataatcacacatactttagtgcttatttcttcatatttttctttacatattttatctgtttttcttaaaatgggatcacactatggttgccagtgcctggcatgtagttcgtttttgttgaatgagagatggcttcacttcgaagatgaaattggagataggtacgattttcacaaggagtcaagagcaagctttctctgtaacaggaataatttgagcagacatcaggacttctgtgttcctgagaatcttgggtgcagtggctcatgcctgtaatcccagcactttgggaggccaaggctagaggatcgcttgagcccaggagttaagagaccaaccaggtagcattgaccccatcttctatttaaggggaaaaaaaaaaaaagaaccttgatggtgacagagaatgcaagtgtgaattgaagacagatggacaaacttgtgttggggggaactgaggtgacatgtaggaattcaaaaaccttaaatttttttttgctgcgagaatattgacaagttaggattctgttttagcattcctttgtagattctccctttctgcccctcacccccgccaccttttttttttttttttgagacagggtcttactctgtcacccaggctggagtgcactggcctaatcatggcttactgcagcctcaacctaccaggcttaaacagtcttctcgcctcagcctcctgagtagctggaactgaaggcacataccaccatgcctggcttattattattttttttttttttttttttttttttaagagatggggtctcactatgttgctcaggctaatctcaaactcctcttgggctcaagtgatcctcttgtctcagcctcccaaagtgccaggattacaggtgtgagccactgcacccatcctctgacacttttagattgccgtgtcagtgtagtttacttagaatatttggagtgagaaccaaaaacaaggtaaattattaagtacctcttctaggatctaggaacatagctatgaagagagaaagtccttgccaccgatgtttatattctgttacggagaggagggatgacttacaataaaccctcactggtggacaaaatactttagggttaaagtagtgaatgaacttattttatgtaacctactttctactgtgcacataagatataaattttagagtatgccaggtaagtgctatggagaaaaataaggaaaggctcattgacatctgcttgggggtgtgggactattatggttataatcttaatttctttcagaaactgggtttatatagaagtgagcaaaacaaaaatccctgtccttgtggagcttgtattttgatgagaaggaggaattcaaattttaaacttctgttaaacgatattttatttccttatttgatttttattttgagaccgagtcttgctgttgcccatgctggagtgcagtggcgtgatcttggatcactgcaacctctgcctcccgggttcaggcagttctcctgcctcaggctccaagtagctgggaccacaggcatgcgccaccaagcctggctaatttttgtatttttagtagagaaggagtttcaccatgttgcccaggctcgttgtgaactcctgacctcaagtgatctgcccacctcggcctcccaaagtgttgccaccgcacctaggcctattttcttattttaaatgaatccacctatattgatattttgtagagtacttatatcagtgtttgacaaatgagggagctttaaatgtttaataaatttaacaaatgttttaagttatgtaggtttaggataagataaccacttaaggctggatgcagcggttcacacctagaatcattccagaccagccccagcaacatagtgagacccccatctctaccaaaaacaaaaaattatccttgtgtcgtggcacacccacgccagcagttgcccttccactgtaccaagtcctaaaattatcttgtagagcgaattatactcattacatttcttaaactcctaagacttgtgatatttaagaattaggatttaaggtgtaagaaagttttcagtaagatttgatgactgtaaccctgttggcaaatgacatcagcttttgcacaccgttcttgtcatggatgaatctgtggttcaggaggtgcaggcaggtggtgacattactactacagctgtcttccaaaagtctgacctatggtgatttataggaagaaacttggatcatactgccttttaccccaatctttagattcagcataaactaatcaaagccagaatgttttaagttacttttgtttttgagacaggatctcttcctatcacccaggctggagtacagtggcaccatcacagctcacttgcagccttgatctcccaggcttacgcgatcctcctacctcagactcctaagtagctagtactacaaggactgtcatgccctgccagttatttttatttttgttgagacagggtctcactatgttgtcttggcatcaagcaatccacctgccttggtcttccaaagtgctcagattacagacaggggccactaagcctggccacatttttttcaagaagaaaaaataggcatggctcagtagttcacatctgtattcctaccgctttgggaggctgaggcaggaggatctcttgaagccagaagttcgagatgtgcctgggcaacataatgagaccccatctctacttttcttttttcttttttcttttttttcaaaaaagaaagaatagttgtctgcaggacgcatttcttgtagctgcctagaactttgtgtggcttcctcaccctctcctttttagtttaggtagctatttgtatggtggtgggtaattggacatctggagcatattagctatggagaaagaaacaagatcaaataactatagtgtagcagaaattaagtacaaaatcttccttattacatttagtgtggggagtaaagaagcagggctcaggagatagaaggggcagtgatctggaggttggttggtattttattttctaattcctcagcagatctgtgtgggagatggaaaaacaaaagctagagaatcttttttggtcacagtgaccaaaagtgtcaggaagaaattactgccagctgatcagcaatcagtgtagtctgtgtatttaaacccatagtctgccatagaggagcttggagtttccaggtaatgcatcgtgatcaagggaacaagcagtgtcaggaattggttgaaattcagttggtctaggcaggcaaggcatgcaatcatgaaggaccagattgtttggggaaatatttggataaagacattacatttattaacaagagacaacaacacagcttagaaattccaacattttgttgattcagataataggactcttgagggcataatttattgtcttagtcttttattgtttgtcatgcgggttctgtgatagaatgactttcatactatatctatcatgaattttcatgctaataagaaacaggttaaacaactcccccatgtataggtatggatattattggagccacataggataaatactagtagtttaaaaaaaacataggtagcagcagcacttgcagtcagatttgtaactaccaaaagtagcctggacttgatttaaacctgtttctgcattctattgcccctgcaatcttttggccatatttacatagaatcaagaaggtttttttctttcttcttcttcttttttttttttttttttttttttggagacagagtttcgttcttgtcgcccaggcaggagtgcaatggcccaatcttggctcattgcaacctctgcctcccaggtttaagtgattctcctgcctcagtctcccgagtaggtgggattgcaggtgtgtgctaccacgcccagataatttttgtattattagtagagacagggttttaccatgttggccaggctggtttcaaactcctgacctcaggtgatccatccaccgccacctctcaaagtgctgggattacaggcgtgagccaccgtgcccgaccaagaaattatcttctctgaatgcttctcatttcaggccacctcattcttttatgcttccatcaaactgccacttgtaaattacttgtaaatcattcttgtaaattacttaccttagtctctgaatttcatctggaaaatgaaaatgttctttaacttttttttttcattttttggtaatagtataaagaagattaatttacatttttttgttttttttaatagaggcaaactgctgaaccaaaaaagatgtcatattcatagatttgcagagtatagatattgcatatgatttaaagaacgaattttaggccaggcatggtgggagatgcctgtaatcccagcacttaggcagaaggattgcttgaggctaggagttcagtcaactcctgggcaacatctctacaaaaataaaaacaaaaattagctgggcatggtggtgcaagcttgtagtcccatctgcttgggaggctgagatgggagaattgcttgagcccagaggttgggaattataatgagctatgataatgcaactgcactccaacctaggcaacagagtgagaccctgtctttttatataaaaagtaaaagaaaaattttattaagagctttgtacctgtccaaaacagatgcttcacagaggtagtaacatttgaaattacaaggatgagtagaatctgcaggtgtttcttagttaggttgtactatctaaggaaccaacagaaaatgcctctctgtgaacttggtgtttatttccaggttggcattaaggagtcaaataggaaagaaaatgtgctactgttcagttgtagggaaagggaaaagcttgaggcaaatgctggaggctcaaggagcgtgatactttcagactttaagaaatcagtacaggaaatatataagataccatagataggtagtcagacttcataaaggctttggtatacgtactgtggggttgatttttttcttttatagaggcaggtgaaaacagaagacaggcaaacctgttgtccacagtctgtacaagcactgtgataggtttgagttaagacagtcacagtaggtaggaatacatgggaagggttttagtgtctatgtgtgcttttagaggtagaattgaaggaccctttgattggtcttagcagacagaaatctggtatgaatcctttaattgggcagtagctatagtatcttgagttattctgagtgtttgctcaatgtttctagtagtgatgatgacttgtagttgggatcctatgtgtaatttggcagaagaggacggtggcttcaaactttgtttgggatataaagttgaccccattttgaattattttaaaataatttgaaagattaatgaaaatgcatttttataactttcattattagtaaaacgtttgactttagaataatgctgtttttcaattaattattattatagtataatggctccaggtgaacttaacataaatatagaacataaactactttttaaagtacagagggagccggcacagtggctaacgcctgtaatcccagcactttgggaggccgaggtgggcagatcacttgaggtcaggagttcaaggccagccttgccaacatggcgaaaccccgtctcgactgaaagtaaaaaaattagctgagtatggcggcgcacgcctgtagtcccagctactcaggctgaggcaggataaccgcttgaacccaggaggcagaggttgcagtgagccgaaattgcaccactgcgccccagcctgggcgacagagcgagactttgtctcaaaaacagagaagtacataagggttgcaaagtcaaatgacttgaagggccaagcaggtgacttagcaggtgacttaatagagcagctaggtttaaaacagcaaggaatagtgtggagtctggacttccgcatgctctatgtaaaggagtcagaatcagaagttttaaaaaacactgtcatcagtgtccctacacaaaaaaggacatattcccaaaccatcagttttctactttttatacaaacaaaatacaggaataattattcaaatgaggccaagcatggtggttcacgcctataatcgcagcactttgggaagctgtggtgggaggattgctagagcccgggaatttgagaccagcctgggcaacatggcaagaccctgtctctattttttaatagtcaaaaaaaagaagaagaagaaaacattcaaatgcttgaacatgacaaaggggttagatggcttattaagttgaattcgccatgtagcatcatgtgtgacgtaatggaaatgaatggcaaaccttgtttaacagaattaaatgaagatgattaaaagtatttctaaaacatctttatttcaaatatttatgaaaataactctgtacatttaccatacccaaggcccctaaatcttaattttgatcttaatcttgaaaatgtattgttgttagcatactttgtatagtgggttttttttgtttgtttgtttttgagacagggtctcactctgttgccgaggctggagtgcagtggcctgatcatggcttacttgcagcctcaacctcccaggctcaggtgatcctcctacctcagcctcctgagtagctgggaccacaggcacatgccaccacatccagcttttctttccttttttttttttttttttttttttgagatggagtctcactctgtcgcccaggctggagtgcagcggcgtgatctcggctcactgcaagctccgcctcccgggttcactccattctcctgcctcagcctcccgactagctgggactacaggcgcccgccaccacacccggctaattttttgtatttttagtagagacggggtttcaccatgttagccaggatagtctctatctcctgacctcatgatcctcccgcttcggcctcccaaagtgctgagattacaggtgtgagccactgcgcccggctgttttttggggttttttttttgtattttggtaccgatgggttttcaccatgttccccaggctgttgtcaaactcctgacctcaagaaaccctcctgccttggcctcgcaaagtggtgggattacaggtatgagtcgccaggcccggccacttggttttttgccatcatggctccctacaacctctacctcccaggcttcactgataatcccactttagccttccaattagctgggactataggcttgcgccaccatgtccagatttttgtattttttagtagagatggggttttgtcacgttgcccaagctgtagtgtcttttctaatagaagctgagaatttcctttgaaactgtctttgtgaacttggaagtgaaatcagaaaaggaataataatgtcttaaattttattgcttattttgttttcttttgtttcttactcttagatgggaatgatgaacaaccccaatccttatggttcaccatatactcagaatcctggacagcagattggagccagtggccttggtctccagattcagacaaaaactgtactatcaaataacttatctccatttgctatggacaaaaaggcagttcctggtggaggaatgcccaacatggtgagtactaatccattacagacttgttttcaaactggcattttgacaaaagaattgtgttaaactttcacccttctgttatatatgctgggatttgtacccactaggagcctaaattgatatgtacttgatgatccctgtgaggaggcttgtgcttcctttccatttctctgttttttttgttccatgtggttattgatcagtgagcatgttgatccaaacaggagtaagtgaactgctacaatgaagttttaggggcctgccattcagcaacttggtcttgtgagcgtttccatacgatacgaaagcggaacctttcacttttgggggaaggaatctctggcaaaggatccgaactctcagtgaccatatttaccaatattatttgattctactacacccaagtaaattccctctcaaaagtaatgtattgttttaaacagcaatttttgttaaataaaattttcaggaacttctagtgttatttttgtacagtcaaactactagtagtaaatgtgtctgcattcaactttggaaaaacattgtctgaaaaaatcctctttcagatgttttagttttgtcctttgtgtcattatgtttatggactgcctatatttgagatactctgccaagtactggagttatacagatgaatgaaacatgtcatctctgtcccgagaaatgttcacttttttttttttttttttttttttttttttttgagacggagtttagctcttgttgcccaggctggagtgcagtggtacgatctcggctcactgcaacttctccctcctggtttcaagcaactctcctgcctcagccttctgagtagctgggattacaggcatgtgccatcatgcccggctaactttgtatttttagtagagacagggtttctccatgttggtcaggctgatctcgaactcccgacctcaggtgatccgcctgcctcggcctcccaacgtgctagggttacaggcgtgagccaccgcgcccggcctgaaatcttcactttttaatttaaaaaactaaatttatcccagagtttagaaaaactagtttttcaccaacccgaaagacccctctgctgagtctcttgaggagttcttcattgctctttaaaacctaatttgggtgtgcttttaactacagacaccctctcacccttccctctcccgctggagtttaccatgtccttctctctgcttttgctctctgtgtattatacatacttatatcacttcgtaatgtcattttttttcttattaaattgagcttcttaaaggtaggagccatggtttatgcattccctgtgtcaaaaaatggagtctggcttatagtagactaaccataaaggttttcattgaaaatatccacatctctatttattaagaaatagcacattatgactcctaccattaaatatattgttatatctctcagggtcaacagccagccccgcaggtccagcagccaggcctggtgactccagttgcccaagggatgggttctggagcacatacagctgatccagagaagcgcaagctcatccagcagcagcttgttctccttttgcatgctcacaagtgccagcgccgggaacaggccaatggggaagtgaggcagtgcaaccttccccactgtcgcacaatgaagaatgtcctaaaccacatgacacactgccagtcaggcaagtcttgccaaggtaagtggacccacagggttactgtacttagcaatttttacagccagggagaagaaggaaaatgtgatcaagtctattttgtggtgatggatatgtttaataccttaattgtggtgatggtgtctgtatgtacaaagtcaccaaaatgtatacattagaccaggtgtggtgtctcacacttacaatcccagcactttggtaggccaaatggggaggattgcttgaggccaggagtttgagaccagcctggacaacatagcaagacctcgccgggcatgatgatgcacctgtagtcctagctgagggactaagaaggctgaggaaggaggattgcttgagcccaggaagtcaaggctgcagggggctatgattgcgccactgtactccagcctgggtgacaatgtgagaccatgtctttaaaaaaggttgggcgcagtggctcatgcctgtcatcccagcactttgggagactgaggtgggcagatcacttgaggtcaggagttcaagaccagcctgggcaatatggtgaaacctcgtctctacaaaaaaatactaaagaaaatcagccagatgtctgggtgtgttcctgtagtcccagctacttgggagattgaggtgggaggatggcttgagcccaagagggcaggggttggtgtgattcgacatcataccactgcactccagcctggacgatagaaccaaaccctgtttcaaaaaaaaaacagtgtacatatgtgtaattttttaaaattattttattttatttatttgttttttgagacagagtctcgctctgtttcccaggctggagtgtggtggcacaatctcggctcactgcaaactccaccttccaggttcatgccattctcccgcctcagcctcccaagtaactgggactacaggcaggcgcctaccaccatgcccggctaattttttgtatttttagtggagacggggttttaccgtgttggccaggatcgtctcaatctcctgaccttgtggtccacccgccttggcctcccaaagtgttaggattacaggcgtgagccaccacgcttggccaatatgtgcaatttaaaaaatatttataccccaaagcatttagaaaattccattgtctaaatgcatcatcacagttaactcactcggtaaaggtcgtcttggctgcgtccattctgtggcaattacgaataaagctgccataaacaaaatcaattttgagactcctttactgatagtgacgttattttaggaaatgataaaaacacagttttttttttgagatggagtctcgctctgtcgcccaggctggagtgcagtggtgtgatctcagctcaccgcaagctccgcctcctgggttcatgccattctcctgcctcagcctcccgagtagatgggactacaggcgcccgccaccatggcggctaattttttttgtatttttggtagagacggggtttcactgtgttagccaggatggtctctatctcctgacctcgtgatccgcccgcctcggcctcccaaagtgctggaattacaggcgtgagccaccgcgcccggccaaaacacactatcgtttttgtgagcaagtatctaaggatgtgagaagagaataaattttaaaggtcttcccatgtggtgatcctcatagactttgatttttatttgccctagcatagcatactttaaatgttattgagggtttgctaactgtcatgtaggcaagtgttcaatttaatacaatttactgcagtcatttttacccgatctaatacaatttgtatgaagtcattaaaaagtgttcttataggcatgtgtgtcataacattggtttagagtacatttgcttagaataaagtaggttgtgtatagcatggtgaaaaatgagggctcttaagccagactgcttgaggttgaatctcactttgagtactctgtgactttgtgcaaattgcttacccattctttttgcctttcttgactgtgaattctgagtattaataggagctaccttatagggctgttaggaagatgaaataagttaatgcatttatgttacttattaagtggtcaacaagttagctattattaatgtaaaaacattaacctgctcttgaaaaaatatgttttcttctctttagtggcacactgtgcatcttctcgacaaatcatttcacactggaagaattgtacaagacatgattgtcctgtgtgtctccccctcaaaaatgctggtgataagagaaatcaacagcgtaagtgatgaaatcttttgaaggtttatatgaaaagttttaaagtctcaccagtgccatttatagtactacttgattatgtgagggacctgtggtgttgtactatgttgaataaatgtttttttcccttttaatttttctgcttccctagtgcatagaattgaactgcttagggagtttgaggctgcagtgagctatggtcatgttactgcgctccagcctgagtgatggagtgagaacctgcctcaattaaaaaaaaaaaaaaaagaaagaaaaaacagtgcagtggctcatgcctgtcatcccaacagttttggaagccaaggcaagaggattcccaggagttcaagaccagcctaggcaacttagcaagaccttgtatcttccaaaaactttaaaaattagttgtgtgtggtgtgcctggctgagatgagaggattgcttgaatccaggaggtggaggctgtagtgagctatgattgtggcacagcagtccagcctgggtgacacaaggataccctgtctttaaaaaaaacaaaacaaaacaaaacaaaaaaaacaactgaacactgcttaacatccaaaataagatccaggaactctcaatacttattatttatacaaacagcaataggtaaatttatgttctgctttgaacctatgaaaatttaaagaccgttgctttggcattgggcaagttattcttttatactatacttgtgatctaaacgttccaggtacttggaaattattttaaaaagaaaaaatatgagattatttttataatattgggatatagaagagctttttttttttaagagaaaagacgagattaacactttaaaattgtaactaccacatctctatagcaacaaaaatttaagcttttagggttaaaggacaaatttgggaagtattgtacagcatttgaaaatggaattaaattttataacaagaattgggaatagaaaatagacaattcaccagagacgggaggagagaggggaactcccaatataattcactattaagaagagaaataaggtatcgtttctctcctgtagtgtaggcagaaatgatgctgccgggtgttggcagttgaatggctccaaagcattcatacagtgttggtcggaacattaataaagccctttgggaaggctattgggcattcagaatcaaaagccttttataccagtggtcccctttaccaatcagttctgcatctagaaatttcttccaggaaataatggaagacaagatccacatactcagatgtttcataatcacgtaacaataattttgtggggttttttattagacatgttagtcttttttttctcaccagcattaatttgtaatactatatcttttgtcttctctagcaattttgactggagcacccgttggacttggaaatcctagctctctaggggtgggtcaacagtctgcccccaacctaagcactgttagtcagattgatcccagctccatagaaagagcctatgcagctcttggactaccctatcaagtaaatcagatgccgacacaaccccaggtgcaagcaaagaaccagcagaatcagcagcctgggcagtctccccaaggcatgcggcccatgagcaacatgagtaagtttgtgtcatcctaataacatggtattggttgtgtcagtaaatgacatctataaacacagtgttgttagctcctttttattttttctgctacatgattttttaagtaattttttaaagattacagtgtaaaaggtcccttacagttcatctacgagaggtaactgccactggtttgtatcttccttgatccttttttgcattatatgagttcagatttgcagaaatgagatcccatatgttattccacaacaaactttgattaatactgtgtagacgggccgggcatggtggctaacacctgtaatcccagcacattgggaggccaaggtgggtggatcacaaggtcaggagtttgagaccagcctgaccaacatagtgaaaccccgtctctactaaaaatacaaaaattagtagggtgtggtggtgcgtgcctgtaatcctagctacacgagaggctgagacaggagaatggcttgaacctgggaggcagaggttgcagtgagctgagattgagccattgcactccagcctgggtgacagagcaagactccatctcaaaaaaaaaaaaaatactatgtagacatctttcatagtcagtattccatgtatcattttaaatggttgtatagtatgtcattctttcattcttttttttttttttttttttgagatggagtctcgctctgttgtcaggctggaatgcagtggcacgatctcggctcactgcaacctctgcctcccgggttcaagcgaatctcctgccttagcctcctgagtagctgggactacaggcgcgtgccaccatgcccagctaatttttgtatttttagtagaggtggggttttcaccatgttggccatgatgatctcaatctcttgacctcgtgatccacccacctgggcctcccaaaatgctgggattacaggcgtgagctactgcacccggcccaacaatctcttacagatggacattgagatctccaattattctgctgctttaaactatacaacagaaattgtgttttgacttgaggcattttgggctgaaacatatagaaatgagtgtagttggtaatgatttcctcatgtctggcaggaggaatagtgtgccttttcaaatagtttttttgtgacttgtttgcctcacttcctgttttatgactgagagggaagagggagaagtgttccagtatcctaatttggggatatatatgtttctctgattgcatatgataacattggaagaattgttctaatatcttaattttgggatatgtatgtttctctaattgcatatgataaaatcaaacagcttttttctgtgtctatccctctgctgtcaagcagttcaaatatctaagctattttgtttgagtagttagacatccagcattgtagagaccaggtcttgtccaggttggtcttgaactcctggtcttaagcaatcctcctgccttggcctcccagagtgctgggattacaggcatgagccaccgcacctggcctaagattatccccccccccacccccaccccggaaacagagtctcgctgtgtcaccgaggctggagtacagtggcacgatcttggctcactgcaacttccgcctcctgggttcaagcagttcttcctgcctcagcctcccaaatagctgggattagaggcacctgccaccacacccagctaattttttttttggaacgaagttttgccatgttggccaggctggtcttgaactcctgacctcaggtgatctgcctgcctcaacctcccaaagtgctgtgattacagacatgaaccactgtgcctgaccctctaagattattttttaatacagattgagtatcccttttcctaaatgcttgaaagcagagtactttagatttttttcggagtttggaatgtttatatttgctggttgagttgagaatcccaaatccaaaaatcaaaatgctgcattgagcatttcccttgaatatcattcacaaagttttggatttctgtatttgggatgccaaccaacccatactgctattttttactttcttcctattttccactgctgtgttctgttgctcccatttttggtttttgaattaatcttcaggacatttttttctttctgtttttctttactatataataacagtattttcaaaccagtgatctgcttttaagcacatgttgagccactgtgcagtaaagtttaatgctcctgttttcaaaactgttgaacaactgttttgtcagaaactgaaagttatgagagtgaaatgcaaacatttttagacccatcaattttgattttgacttttaataatttaagatctaaaatgctagatagtgacatggagcttcttgtattcaagtttgtaagtcagattttgcagtcactggcatgactattttagacagttgtgctaatgctcattgtaccagaccatttctattttaatattctttagattcttcattcctgccctgttgttattgtttattacttggtctgttgatttcattcttttcttttttttttttttttttctgatttcattcttgaaagtagtattttcaaggaggatgtttttcttgagttttacctaatcagggacttagataagttttcttagataaattatggataactagaaacgtacgtgtgtgtttgagtttggtctcgctgtgtgcatgtgtgtttttgagactgggtctgataactggaaacgtacgtgtgtgtgtgtgtgagattggtctcactgtgtgtgtatgtgtgtgtttgagactgggtctcgctgtgtcacccaggctggagtgcagtagtgcgatcttggcctgcatcctctgcctcctgggctcaagcggtactcccacctcagcctcccaagtagctgggaccacatacgtgcaccaccacgcctggctaatttttgtatgttttgtagagacagggtttcgccatgtggcccaggctggtcttgaactcctgagctcaagtgatcgcctgcctcgacctcccaaagcagtttgtgtttttcgttacttccatgacaaccagtactaactagttaaataattattgagtgacgagtttttaagcaggactaggaaaagggatgaggagcaatcttgccttttcaggcttccttttacctcttctgtattgaaaataacatgtacagcggtaatggaaagttggacctggacactagcatattttcccctcttgttttatatcttctgtcttggaatgagcattgcttttttctttctttctttctttttctttttgagacaacatctcactctgtcgcccaggctggagtgtagtggcgccatctcggctcactgcaacctccgcctcctgggttcaagcgatgctcctgcctcagcctccaagagtagctgggactaggcgcacaccaccacctttttgtgttttcttttagtagagacagggtttcaccacattggccaggctggtcttgaactgctgacttcgtgatccgcccacctcggcctcccaaagtgctgggattacaggacgcccagccagcattgcttttttatctcccattccatgttacgcagaatgcacttacctttttccttaagttttagtaggttgttgtcttcccctggcctggaatttcattactgtaattgggtagttcccttttgtttttcaaagttatgtttatagttcctattatagctcttttcctctcattatattatcttgcctatgtacttttatatatatgcacaattatttgaatgataattttgggggatttttgcccccatttcttcgtgtctttttatttagaattagatttaagattactcaagttccctttgtttttatttcttctggtctcctgaagtgctgagattacaggcgtgagcctctgcgcctggtcacatttgctttttttttttaagttatgtttcgttttctatgatttactgttgggtgcttcatctttttcttacctgtttgtaagggtgcttcaaatcagcctttacatatgtgttgccagttatattgtcaattatttattgtatatgctgcaaattttttttctgatttgtcatttgtttcttaactttatagtatttattgtatggtggctgttgtatttatttctgtctcctgttatttcattttgacttaggtgctagtcctatgggagtaaatggaggtgtaggagttcaaacgccgagtcttctttctgactcaatgttgcattcagccataaattctcaaaagtaagtcttaacgtgatttataccctgggtcacattacaaatactactggttaacaattcattgtttgacttttgaacttagtttcctcggtttgaggatgtctttgaatacagatagatgtttgagtccattctttcttttttcgctctgtagcccaggctagagtgcagtggcatgatctcagctcactgcaacctctgcctcctggttctggttaaagcaattctcctgcctcagcctcctgagtagctgggattacaggaacacaccaccatgcccagctaatttttgtacttttggtagagacagggtttcactgtgttggccaggctgttcttgaactcctgacctcgcgatccgtctgcctcagtctcccgaagtgctgggattgcaggcgtgagccaccacgcctagcccactctttcttctttctacagccttaatcgaaattgtattgattttctagtgtagcctacaccttccctaatacagtaggatgttgcaaggttacagctccataatagccttatcctgatgttaagaattagtccaccagcctgggcaatatgtcaagacgtcttctctacaagaaaatacaaaaaagttaacggggcatggtggcgtgcacctgtagtcccagctactgatgaggctgaggtgggaggagcacttgaggctgggaggtcgaggctctggtgagccgtgattacaccactgcaccctagtctgggtgacagcgagactgtgtctcaaaagataaaaattattattttaaaaagagaggtagtccatcatccaaagcattccctgaggtgagctgtgttaaaatgacagcttagtctgataacacaagccttagaaaactaagtatgggccgagcatggcagctcccctgtaatcccagcactttgggaggccgaggcaggcagattgcttgatcttagaagctcaagaccagcctgggcaacatggcgaaatcctgtctctgctagaaataagaaaattagccgggcatggtggcatccacctgtaatcccagctactcaggaggctgaggcaggagaatcgcttgaaccccggaggcagaggttgcagtgagctgagatcatgccactgcactccagcctgggtgacagagcgacacgccatctcaagaaggaaaaaaaaatggctgggctcagtggctcacgcctgtaatctcagcactttgggaggcccaggtgggtggatcacttgaggtcaggagtttgagaccagcctagccaacatgatgaaaccccatctctactaaaatacaaaattagccggacgtggtggcgggtgcctgtaatcccaccaactcaagaggctgaggcaggagaatcgcttgaacccagaaggcagagattgcagtgatctgggattgcaccactacagtccagcctgggcaacagagcaagactttgtctcaaaaaaaaaaaaaaaaaaaaggcattacagacaaaacccagaaaatgaagtcttatgatatcttgtgttaggacatcatcctgccctccaaagaaatacaacttaccctcacacaggtatgaacatgcacagtttaaaatcagtctagtcacacacttctccctgcctagctccttaatgcgaatagaagtgacatagcatattgattccattacaataatcagtgtcagcttgaattaaatgaggtcttctcctacctttcttcactaaaactatttggtgacccctttttgaagcccaatgatgagtgaaaatgccagtgtgccctccctgggtcctatgccaacagcagctcaaccatccactactggaattcggaaacagtggcacgaagatattactcaggatcttcgaaatcatcttgttcacaaactgtaagtaagattgtggacacgtctcattcgtaaagagatgttacgtcaacatgttttcaatctcctgggcatttaattactaaaggaatattagcaatttttctgtagcatggaggttgatgttgatacttctactcttgtggatttcttgctgctgctgcttttttccttctcaacctttcccaccatcatctatggtagtctttcagctttaatggtatgtgaactattctgtctagtgacagtaaataatatattaaacattgtttttagctattgcctttgcaaaacttatatatctaagaaaaactaggcctcagctcattaaaatattgcattgataacatccttttctgttactcctggtagagcaggggttttttgtttgtttgagatggagtctcactctgttgcccaggctggagtgcagtggcacgatcttggttcactgcagacttcgcctcccaggtgccagtgattctcctgtctcagccgcccaggtagctgggactacaggcacgtgccacctcacctggctaatttttgtatttttagtagagacggggtttcactgtgttggtcacgctgacttcaaattcctgacatcaagtgatccgcctgcctcagcttcccaaagtgctaggattacaggtgtgagccaccacgcctgtcctggtagagcttttattatgtaaaaatctggtagggtggactctctggtcttctcgtcctccagatgtgcacatggcagtttatttttgagaagttgatatatttcaggcactctccccttacgaactccatcttaatctaaagagtttttgtcagatgaaggagggggaggcatatagagcaaggtaatgaaatgtgctcagcatcataaaaaggtagagcttggaccttgccaattacagagtttacccttcaaacaccatgcagtattttttcttggagaagtcttttcatttcactttcagttaatagcagggtcgtctttactgtatccatattttttaattgactgaggaactatttatcattttgtcttaatttatttttatgttatgtcaaactaccaattatatacgtttcatttaggaatttttttttcctcccacgaacccatgcttgctaatcatttaggattctttgtttgtttgtttttgtttttgtttttgagactgagtctttctctgtcgcccaggctggagtgcagtgtcgtgatctcggctggctactgcaacctcccgtctcctgggttcaagcgtttctcctgtctcatcctcccaagtagctggggttacaggtgtttgccaccacacctggctgatatttgtatttttagtagagatggggtttcgccgtgttggccaggctggtctcgaactcctgacctcaggtgatccacctgccttggcctcccaaagggctgggattataggcgttgagccactgtgtccagccaggaattcttcagtggtagcactaagtaacggaatttgacaaggaaagaacttcacaagtttaatgaaattattcctttaataaagaataaccgatctcttattttgtgacagactattcaggaacttttatttaatggacagagatgattatttggggttgatcatttgactttacgttaaaagtttattatatatgctcgagttttctaccaacttggtattattctggacttccatttatatcttcttgatctggttccttcaagtcctatgcaactgagtacgggatgtccaaataaaattagtgcctaaagatcacatttgtcagtcataagagatactagtgcaaaacattttgttagggaattgcatgaaagtgaaaaactgaatctaacagaatcattacgcatttctggtctgtccacttcaggtttttggttttttgtttgttttttataagcctttgtcagaacagttcaagtttttgatgttttaacattttagagtggttactgaattttatttcagtaagctaaataataaatttagaagagcagatggaactctgaaggctacttgatactatgacaaggcctgttttcctcactgtctttagtatgtaacccaaagtaatattttgctttatgtctagagtaacagggaccaaagagtattttttatagagtcatttcttatattgtgaacggaaatatagacaaaaattcttttgtttatcacaaaaagataatttcatttcagtaagtaatatatatcaccttgccattattttttcttttcctctatgtgttcagtgtataaaaatcagaaaaatactaattaaatgctgacatgatattacagtggtaggattttctttttccagcgtccaagccatatttcctacgccggatcctgctgctttaaaagacagacggatggaaaacctagttgcatatgctcggaaagttgaaggggacatgtatgaatctgcaaacaatcgagtgagtgtctggtttttttctattaatagccaagattgaacctgttgtggttattttattcctctttagcatgtacaagtagtacatatgcttcagacgggggacacgctgtagctatcccgtcttattgtccccaagcatagttaggataccaaagcagtttcttaagtgtatgtcatcaagaatcttatgtttttcctcctaatacagtgcactcatgtggcactttatctggttgtcctgtcaacctaaaaagtggctgagctggccgagtgcagtggctcggtgcctgtaatcccagcagtttgaaagtctgaggtgggcggatcacttgagcctaggagttggagaccagcccgggcaacatagcaaaaccccatctctacaaaaaattagccaggcatggtggcacgtgcctgttgtcccagctgctcaaaaggctgaggtgggggaatcaccagagccttggaagtcaagctgcagtgattcgggattgcgctgctggtgacagagggagaccttgtctctctcaaaaacaggagtggggtggtgctgagctgttaccagctgtgttctcttttcactagaatataatgaagtagcgacttaactgttgttcacggtagttcagattctctacataagttgaactttcctttctaaattggcaccagttcttaatgcagcatataaaatgaaactaatatctattctcagtttattttttctgttacctggtggtagttccttttttcctcatctcccttattttacttcaacaattcaaaaggcggaatactaccaccttctagctgagaaaatctataagatccagaaagaactagaagaaaaacgaaggaccagactacagaagcagaacatgctaccaaatgctgcaggcatggttccagtttccatgaatccagggcctaacatgggacagccgcaaccaggaatgacttctagtaagtggtttttgttatatttctgtttgagagaaattgataataaaatagtttctatctaaagtcattaatttctgtaagcttgtgtaactattctagagttttttaaataaccatttgcctttgcaaagaaaataactcatctactagtaaaaacagaagcagaacaagtatatttaagatgtctgggcatggtacttaacataccttgataatctggaattgtttttagagcccaaggtgtaaacttctctaatagtgacatctagaaagcaatagcctacatacagatgttcacagatttctctgagactggcttgtgtggtaagtagccagtaaatgtttgtaggctgaccaggttcaggagccctgtaacacacataatatcatattacactgtcacactttctacttgacataaaatattctaagtctaggaactctttttttttttttctttttctttttttttgaggcagagtctcactccgtcacccaggctggagtacggtggcatgatcttggatcactgcagcctccgcctcccaggttcaagcaattctcccacctcagccttccgagtagctgggattacaggcacatgccaccacgcctgtctaatttttgtatttttcgtagagacagggttttgccatgttggcctagctgatctcaaactcctggcctcaaatgatccgcccaccttggcatcccaaagtactaggattacaggcatgagccaccactccctgcctagaagcatcatttaaaattacattttgacagcttcagtttctgattatagcatcattgttgacctgatgaattaaccagatagccaagactatgataaatagtcttactcaatcgttgacttattggtacgatcaaagtagtgaaatatggagcaggcacaccattttcaggaatggcacaggctgtaagtgctgtgagcaaggctgtgataggaaaaacctgcatttactgagttaggaaatgctaatgacctctaagaagtgccaactgagccagcgggcagtaaacctcatacgatcagtagattataggtgggctgagaagttcatctctttcattcattgaagtagtaaagtagagaaccattggttaccactggcctttagcagcctcatttgctaactgaagtgtgccaggtactgttttgtaatgtgtaaaaagttgggaggagcaacattgctgaggaaatagtatacatggaggctgcccaatagtaaggaaaaacacagattttttgagtagttagaacaaattttcaggaatgaaaaagtcaagattagagttgagactgcttcagtacatgatttggacttgagtagtaactaaagattaaaaaaagtagacaggctgggtgcggtggttcatgcctgtactcccagcactttgggaggccgaggcgggtagatcatgacgtcaggagatggagaccatcctggctaacacggtgaaaccccatctctactaaaaatacaaaacaattagccgggcatggtggcgggcacctgtagtcccagctactcaagaggctgaggcaggagaacagtgtgaacccgggaggcggagcttgcagtgagccgagattgtgcctctgcactccagcctgggcaacagagcgagactctgtctcaaaaaaaaaacaagtggacatacctgagatacttggttttggtagaatttactcaagttctgggtgaagttctgagccaagtttaaagtctgtgagatattaaattgtattctaatgtcagtataaacagtatggtactgatgtaagcaggaataagtggtagtggaactgagtatcagccttaagtatatgttgacctttagctcgtactaaatctgacattttgtagaatgagattcttaccttaacctgatacacagaaaataatagaagcataaaagtggtcgggcatggtggtggctcacgcctgtaatcccagctctttgggaggctgaggctgcagatcacttgagcttaggagttcagaaccagcctgggcaacatggtgaaactctgtctctataaaaaatacaaaaattagccaggcatggaggtgtgtgcctgtagtcccagctactcaggaggatgaggcaggaacatcacttgagcccaggaggtcaaggctgcagtgagctgtgattgtgccactgcacttaagcctggacaacagagtgagatcctgtctttaaataaataaataaggtttgtaaactttgaaaaaacaaaattgaaagaactacgtagaatgttgaagaaaacataacattctcatcttcatgtttctttaacatttgtttttttgttgttggttttgtttttgttttttttttgaaacagtctctctttgtcactcaggctgaagtgcagtggcaccatctaagctcactgcaacctctgcctcccagattcagttgattcttgtacctcagcatccccagcagctggaattacaggcatgcatcaccacacctaactaatgttttgtattttcagtagagacagggtttcacaccatgttggccaacctagtctcgaactcccggcctcaagtgatccgcgtaccttggtcttgcaaagtgctgggattacaggcttgagccatcacacctggccacgtttgatttttttgttttaatacaaagaatacagttattatagaatcagagagtggcaatggcaggactatgtgtattggcctaaaaatatgcccatagtaaacttatgtaacgtgtaccatcttgaaaaaataatcccggttgttaatggagttgaaggtaggtaactctttccttattaattttttgcaaagatacgaagtttcaggaaaagctgatgacagaagtatgcatgttatagtctgagtttttttaagtgtggcatatgccctagaaaaagttctggaagaagtaaatactaatctctgaacatgggcttctgatgggggcagtggaattccaggatacttgtgttgtgtgataaagggtttttgattatttgacttaatgcatatagtttgcattaagggcatatatattgaaatgtgaaagatggacatttttgtttgtgtatattttctttacctctaaatatttatatatatacatttttgagatggggtctgtttcgcccagcctggagtgcagtggtgtgatctcggctcactgcatcctccatgcctcccaagctcaagcaatcctcccacttcagccccccaagtagctgggaccacaggcacacgccaccatgcctggctaatttttttttattttttagtagaaacagggtttctgtatgttgcccagactagtctcgaactcctgagctcaagatatccacccacctcggcctcccaaaatgctgaaattacaggtgtgacccactgcgcccagcctttaaatatttatcttaaaaaatagtatcaagatgttcctttaaataattcatcaagtttccttaaaatgacaagagctgcctcatggagcaataatagatacattcgtatctgcatcatatggggcaaatgtgggcagtaggattgcggttttatttttaaaccattttcatttgattagtctcaaatacttaaaaatcagaagattttgcatttaaaaagtctgaatttctggctgctttaaaaaaaaaaggacatgtctggcagacttgaccccctttctcctacagtgacacctgtctatagctgcactcatggctgactctagaagagctgtgttttctctccacttcagtcctcaccattctctattgttttgggtacttaaaacagttttacttggtattagctgcttggcacttgccatttagcttggaacacctatccatattgttgacttgaaaaaaaagttactcatatcttaggtgaaaacattgttttgtagatagtgtgcgtgaatacagatatgtgtggggaggaagaggaaaggtttatctcaaggtcatttgttggatcctgattcatttttctattgatttttaatttttatgtaatgagcatggattatgcatatacttcttataaagcttgcagagttacagataaaagtttatatgaataaatgttgagcatttcctctctcagttttgctcatttactaaaggttgaaatttgtctgaagggatggacatctccttagaagagcagcaggtcttcctctcctatgcctgaggcttgaatgtacagcccttgatggagggtatggccagggtggagccaggtcactacagacatctgtcctttccgagggtgctgtaaaaatattttctctgtgcactatgttgaaagtactacactagagcatgtgcagataatccaggaaaaagaccttagaatttatgtatttatattttaggttttttttgagacggagtctcgctctgtcgcccaggctggagtgcagtggcacgatctcagcttactgcaagctccacctcccggggtcatgccccgggttcacgccattctcctgcctcagcctcccgagtagctgggactacaggcgcctgccaccacgcccggctatttttttgtatttttagtagagacgggtttcaccgtgctatctaggatggtctcgatctcctgacctcgtgatccgcccgcctcggcctcccaaagtgctgggattacaggatattttatttttttaagaattatttctgtttttgtatttaagaggtacatgatatgtagtgtggtataatatgcatattatttaaaatcaatgttcacagtttatgtgcataaaaacgttgtgctacatgatcaaattcggccaccattagacatgattcatagctattatccatggagatactctgttgcatgccaaccagactcagactttgttaaacaataacatattaaatgctatgatggcctcaatttttttttttttttttgagacagagtcttgctccatcgcccaggctggagtgcagtcgtgtgatcttggctcactgcaacctccgccttccaggttcatgcgattctcctgcctcagcctcctgagtagctgggattacaggtgcctgccaccacgcctggctaatttttttgtatttttagtagagacagggtttcgccatgttggctaggctggttttgaactcctgacctcaagtgatccacccacctcagcctcccaaagtgccaggattacaggcgtgagccactgtgcctggcctataatggcttcaatagcttatttttctatcaacattgaaagcacccgggctcataaaggaataccaacaaatccacttggaggcatttttctgtattccagaaataacattttcttcaagcttctgtctagttcagagctttattttgtgattcatactcaattttcaaaggtattattaaaaatattttgtggggtttgtgtgtgcagtgagtttttgtttggttaagggaagatggtgcaaagatacttatttctcttttttactctagatggccctctacctgacccaagtatgatccgtggcagtgtgccaaaccagatgatgcctcgaataactccacaatctggtaaatagtgaaaaaaatttttttattttaaaagaatccccggtgtactgcaagataatacttgctacctgaacacccgctttatgccaacagcaagtgtcatgattacctgcccatagaggaagagggggtgaagagcaggttggctggcagatcacagggcaggtgacattaaatgatcaagtatccattaaaaaacaactgcaggctgggcatggtggctcacgcttgtaatcccagcactttgggaggccgaggctggtgtaccacctgaggtcaaagtacgagaccagcctggccaatgtggtgaaaccctgtctctactaaaaatacaaaaaaattagccggttgtagtggcacgggcctgtaatcccatttactctggaggctgaggctggagaatcacttgaacccaggaggcggagtttgcagtgaggcgagatcgcgccactggaccccagcctgagtgacagcaagacttcgtctcaaaaaaaaaaaaaaaagcagattgtaaaatttgtaaaattcagtttggagatcctgttagttgataatgtctgtttactgctactgtgaatgagacagatttatttatacttagaaggttgaaagccagtttattagtcctgatagaatcagggccaggtgcggtggctcacgcctgtaatcccagcactttgggaggctgaggcgggcagatcacaaggtcaggagatagagaccatcctggctaacacagtgaaacccccgtctctactaaaaatacaaaaaattagctgggtgtggtggcggacgcctgtagtcccagctactcaggaggctgaggcaggagaatggtgtgaacccaggtggcagagcttgcagtgagcggagattgcgccactgcactccagcctgggcgacagagcaagactccgtctcaaaaaaaaaaaaagatacagaatcagacataagaattctatcttttattattcaatttcacaaaggcattcagatctaacattttgctcatattcacaggtttgaatcaatttggccagatgagcatggcccagccccctattgtaccccggcaaacccctcctcttcagcaccatggacagttggctcaacctggagctctcaacccggttagtttgacgtctttggtaatctctttggcctttacctggtattttgaaaatcctgtttgttcctactttataaattctcacagtcatttaaacagaccataactcctagttcttctgtaattcttctgtatttaactctactagaaagctgaccaaaaaacgaaaacagccagtcccttgtccctggagtgtcagtgtttagtggcctgcatgcgttttcacggtcacttctcttccctgatgtctgtcttccctcctccaggcagagaactgtcttgcaaggttgatggtgcgtttttgcctggttcttgaactcggagaagagagactaggcttctcctgctccttatgcgaactcttaaccagtccatctctctaccttgaccctaaccctcctgctgccctttagagttagctggtgcctctgattcttgacccttttgggggttcctgagcattactacttctcactaatctgccattttcaacagggagttctgtccttcattttaacctataagacagatggtcttagcttatgaagtttttggcctttggtactcgagatttctttctttaaggcctgaatttgtgtagggtaattttggaaatgacatgtaacagtgctagagcatttgtggaccatgaatgctaccagattctgctacaacttgtaagattttcttgtttttacatattatgggtcttagaatttgtgttattacatcactgacatgacctcatgaaattgtgattaactctcctcacttaacagagcatgcaaagaaaattacctgctatccttgtgctaggcatatttgtgtaccaagagaatgtgtgttccatcctcttactatttcttggagtaggcctaggtaaactgtgaggctatttctctttatcttggcacaagagtcagttgttctacaactttcttccttctcctcttcagccctcttcacctatactcctgtctttggcttttctctacttaataagcctgacgttaggagcatttgatgattttagttatagtagaataactataatgaagcagtttggtgatttgtgttttttttttttttcagcctatgggctatgggcctcgtatgcaacagccttccaaccagggccagttccttcctcagactcagttcccatcacagggaatgaatgtaacaaatatccctttggctccgtccagcggtcaagctccagtgtctcaagtatgtctcataagtggatttttcacttatttttgattcttgaaacttctcttgatgtaggtttttataggagagagtggcagcaaatagtgggtgaaaacagatgattttttaaaaaataacaattttggacttagggtattctgaacatgaagagattattctgtgacatagcaatggtgttaattgttacaaagtaggaaataatttaaatggatagttttaattgtttttactagtgaacactttaaaataaatcttagaattaaacacaatgtagaaggaaatctggctgaaaagagcataggcaggccctagagcactctgcactcaattctgccatttttctgcggtggctgaggccattctgctgaatggtttgaagtctctttagttaagtactatcttgatggtgctgtccaaagatacatgcccagtaatagggtattttacacattttgaaatagacacattgctactctttgtttaatcagtttgtgtcctaaatttatatatcatgcctatgtaagtatttccttaattctgttctgaattgctgtcttgttatgttttttattttaacaggcacaaatgtctagttcttcctgcccggtgaactctcctataatgcctccagggtctcaggggagccacattcactgtccccagcttcctcaaccagctcttcatcagaattcaccctcgcctgtacctagtcgtacccccacccctcaccatactcccccaagcataggggctcagcagccaccagcaacaacaattccagcccctgttcctacacctcctgccatgccacctgggccacagtcccaggctctacatccccctccaaggcagacacctacaccaccaacaacacaacttccccaacaagtgcagccttcacttcctgctgcaccttctgctgaccagccccagcagcagcctcgctcacagcagagcacagcagcgtctgttcctaccccaacagcaccgctgcttcctccgcagcctgcaactccagtaagtagagatttggatttaggcagaatcattagagctatactgtagtattatattacttctgggccatttccattctcttttgctttatctcttactgttttctccacaagtagaatgtaatctatttttcattagggacttttgtatcctgttttgccttcctgtgatagtacctatcgtagcaggagcataaagattttatttagctctgactttgaccattatgtttcatgttgtaccctgaggtctgaaggtacgtaaaggggtacgacaaggggacacaatccttctccttatttagtatattatttagtgcagcacataaattttacatatatttaaggaatctttttcaaacagtttgagccataaaacctagagattgaatttaaaaattgcagatttggacgggcgcggtggtgtacacttttcatcctagcactttgggaggctgtggcaggcagatcacttgaggtcaggagttcaagaccagcctggccaacatggtgaaaccctgtctctacaaaaaaataacaaaaattagccagacatggtagcgggtgcctgtaatcccagctactcgggagactgaggcaggagaatggcttgaacctgggaggtggaggttgcagtgatccgagattgcgccactgcactctagcctaggcgacagagtgaaactccgtctaaaaaaaaaaaaaaaaattgcagatttatgagtccttgtggcccaaaccaaagtttaaaaataagatgagagaattatagacccagaacaacctgtagcttccttgtgagaggttggttatgtatataataaaaatccaaattctcatctaatagttgaatccttattaatagaactttttttaagggtttagaagcttctactttgataccgatattaatatatatcggtatccaatagttctcagccatgttgatgaactgagaagttccatgagtcacagccgttttataaagtactgtacttgacggatggctggttcatcgtggcctctgatagacaaggaaggacagaatgagagaggaaccagtggatctgcttgattttattctttataaaatcaaggatacttccagaaaatactgacttctcattaagagatttcttatgacaagccttaggataaagatagggaatgccagtttatctcattagaatctagcgattcaaaacagccactctctgggacatcattatatttattgtctccttttctgtacctttgaaactttctctggtgagaaggtaaaaacaagccagtctttcttattttctttcactcatttctgtataaatgtgagctcctctgaagcagacatctttgaaatccccacacactgccagataatgatagttatcaatgaaatagttgctggttctttgatgtacaatcagccaaccagtatttacaagtcttaattctcctgttcttaagcataattaagggaggtgaaatgggcagagcaaatgaaagcaccatgaataaatataagccaagaaataggtggctaattctgctatcctgttgcttaccttacattctgattgtatcgttggcagactctgcgtgtgtctcacctacttcccttttttttctgcccagctttcccagccagctgtaagcattgaaggacaggtatcaaatcctccatctactagtagcacagaagtgaattctcaggccattgctgagaagcagccttcccaggaagtgaagatggaggccaaaatggaagtggatcaaccagaaccagcagatactcagccggaggatatttcagaggtgagagtagggcaattactgtttgatttggttaggacctcagtataggaacccaagttttaaaaaatattgcagaaaaatattttgataattagatctcatggcatagattttgcatgagaaagggtgttcagattactgattcccaactagatatctttggaatactaaaaattcttacgttttcttttagtctaaagtggaagactgtaaaatggaatctaccgaaacagaagagagaagcactgagttaaaaactgaaataaaagaggaggaagaccagccaagtacttcagctacccagtcatctccggctccaggacagtcaaagaaaaagagtgagtctctgaagccattcgttctggaggtagctgaagaaaccaaagacccagggcagaattgcggtcatgcctcttgggcctcagaagttgccattattgtgatttcattaacctggaagccctgggcctggtctcttcattgttactaataatttttctttcttttttttttttttaatattcacttgcagcaaccaatgagttaagtcattcccctcatttcttcagggttccctgtgttagtacaccctaaaaattgtctcatttttcaggagagagaaatgtttgtaaatagccttgactaaaatgcaggaaagaatagcaatagtaatagcatttgtcattcacctgctgtgtgctaagtatccacattgtctcatttaataatttctttctttctttttcttttcttttttgtttggaatcggattctcacttttgttgttcaggctggagtgcagtggcgggatctgagctcactgcaacctccacctcccaggttcaagcgattctcctgcctcagcctcccgagtatctgggactgcatgcgcatgccaccatgcccgtctaatttttgtatttttagtagagacaggatttcaccgtgttggccaggatggtctcgatctcttgacctggtgatccacccgcttcgagctcccaaagtgctgggattacaggcatgagctaccacacccggcctcatttaataatttcacaacagctctgaggttattggcctgaagcttagcaaagttaagtaactttccacaggttactcagctgaccctactgcctgggccaggaagcagacccaggcagtctgaggcagagtgctcaaatccagccattccaacaagtgttaattgactattttaggactagaacttttgtggctctagtgatctgcaaaaggcaccaggtaggacatacctgaggagtgagtctgctggctcttacagatgatatatattgaaaagtgttccattaatacaatgtgttgtaaaatgttgggattaaaaaattattttcattttaaaaataagacttgtatatattgaggtgttttaatatgggctgtaacaaacccagtcttactattggcaatctctctttaaaatgtgtgttccctcatgcctgtaatcccaccgctttgggaggccgagcgggcagatcacttgaggtcaggagttcaagaccagcctggccaatatggtgaaactctgtctctactaaaagtacaaaagttagccgggtgtggtggctctcacccgtagtcccatctacttgggaggctgaggcagaagaatcacttgaacccgggagatggaaggaggttgcagtgagccaagatggcgccactgcactccagcctgagtgacagagagtaattgtctcaaacaaataaataaaataaaatgtctaatttcacaagtttattcaaatagtccttatttttagcacagctaaatatgagtgacaagcatcttcgtagtctggtttccccccactccatggcaaccccccagaggtgaaaattatctgaagtaacaaatatactctaccgatgatgaaattttttttgccaattaagaaaaaataaggcccttgctgaaattgaaagctttttaaatcactggcttctcaaagaactgtttgattccatttgggacacaccaacaaatttttccggactttttgggaaatatcattgagaacacatttgaacttaatttgatcaactaagtctattattttagcaataccatttttgttctctcttcttttaaacttaaacctaacatttgtcattaaaatagtacatgtctctttttctttggctctaaaataccaagcatttgaacgaaggagtcttctcttctgtgcccctgactccttgtagtataagacaatacctgatctagtctagtttctgacttgttaaatactgatgtcatgaagaaagacttttctgttcttgcttgactgcatctccctcttaacacgagtatcttgtgcactctttttttttttttttttttttttgagatggggcctcattctgttgcctaggctggagtgcagtggcgccatctcggctcactgcaacatctgcctcccgagttcaagcagttctcttgcctcaagcctcctgagtagctgagactagcatgccaccatgtccgactaattttttatatttttagtagagacgaggtttcaccatgttggccaggctgaaacttctgacctcaaagtgatctgcccacctcagcctccaccgtgcctggtcccatggactcttatttggcaaagtctcttcataaatttttagaagcctttggattctgcttctaattgaccgagtctgtcttcactgactttgtgactgaaaagttaagctgagggtgaagagtgttttaaggtgataagacacaatgttttttaggagctgtctgaaacaaagcggggcttagaatctagaatcagtgattgagcctgtagtgatatttccatggggacagagtggttaattttgttattgattcttgagatgcttttagagcttcaggctgaatgattttttaaagttcttctgcttaattggtaactaatttcaaatgcactttttttttttaagttttcaaaccagaagaactacgacaggcactgatgccaactttggaggcactttaccgtcaggatccagaatcccttccctttcgtcaacctgtggaccctcagcttttaggaatccctgtaagtatttggtggtacttttgattttattttttaatttgataacagctttattgagagataattcacattccaaacagtatagccactcatttcaaatttgtaattcagtgattttttttttttccccctgagacagggtcttattctggttgcctaggctggagtgcagtggcacgatcgtggctcactactgtctccacctcccgggctcaggtgattctcccacctcagcatcctgagtagctgggataactacattcatgtgccacctcacctggctagttttttgtattttttagtagagacggggtttcgccatgttgcccaggctggtcttgaacgcctggactcaagcaataggcccatctcagcctcccagagtgctggaattacaggtgtgagccactgggcctggcctaattcagggagttttagtatattcacagagttgtgcatgacactttcattttcatcatctgaaaaaaatcctttaccattaacagtcactcactattttctcccatagcaccccaatcctagacatcaccagactgcattctgtctctggatttgtctgttctacatgtttcattaaattggaacatacagtatgtgattctttgtgccaggacgttccttagcataatgttttcaaggttcatccatgttgtagcatgaatcagtagcacatacctatttatagcccaataatattccattatttttctttacctgttgatgagttgatagacatttaggttgtttacacgttttgactattaagataggactgtagtgaacattgtgtggatttaagtttttatttctccttggtatttacctaggagtggaattcctgggttatatagtttgtttacttttttgttgttgttatttgttttttgtttttttgagatggagtttcactcttgttgcccaggctagagtgcaatggcgcaatctcagttcacctcaacctccccctcccgggttcaagcagttctcctacctctcagcctcccgagtagctgggattacaggcatgtgccaccatgcccggctaattttgtatttttagtagagatggggtttctgtatgttggtcaggctggtctcaaactcccaacctcagatgatccacccacctcggcctcccagaatgcccagattacaggcgtgagccaccgcacccggccactttcgttgtttcaagagcaataggtcatagcagaaaaaaggaccgtggttagctttgtttttaaagttgcctccatatactaggctgctggcagatttcatttggtggttttaaactgttacttggccgggcacggtggctaacgcctgtaatcccaacacttttggaggccaaggcaggcagatcacttgagttcaggagttggagaccagcctcaccaacatggtgaaaccccatctctactaaaaatataaaaagtaactgggcgtggtggtgcacgcctgtaatcctggctacttgggaggctgaggcaggtgaatagtttgaacgaccctgggaggcagaggttgcactgagccaagattgcaccactgcactccagcctgggcaacatgttgacagagactccatctcaaaggtcaagtgcttccaggggcaaaagccttttaggacttttcctctcttgtatcttgctgtgatttcagatggaacattttaagttctgtgggcttagtttcctcattgtacaccccttctagtactaaaattttaaatgtctttgactttactgatctcacatgtactttcataaagaacctgaagttgcttcagtagaatatcagcctgatgtctagaaagtccatagtagttctgtttctctgccctttgagtagtttaatatctctgtaaactaatatttaaagaagtgatggacatcagtcacctcttggggaatatagacaggccagaaactaaaacactgcctggaaaattaacaatgataatggatgatactccatctcccgtaaaaatagtgagacttgagtaatgtttgatgtcacttgtctttctaggattactttgatattgtgaagagccccatggatctttctaccattaagaggaagttagacactggacagtatcaggagccctggcagtatgtcgatgatatttggcttatgttcaataatgcctggttatataaccggaaaacatcacgggtatacaaatactgctccaagctctctgaggtctttgaacaagaaattgacccagtgatgcaaagccttggatactgttgtggcagaaaggtaagaaatgtgtttcagatttgactttaacttttctgggatacctagaataatatagtggtgactgggataagagaatatcctgcttctggctttgacatggcttttttttttttttttttttttcctttttgacagggtcttattctcccaggctggagtgcagtggtgaggtcatagctcactgcagcttcaacctcctgggctcaagcaattctcccacctcagcctcctgagcagctgggactacagccgtacgccaccatgcctggctgattttttaaatttgttttgtagaaacagggtctcatgatgttgctcaggctagtcttgaactcctgggctcaagcagtcctcctgcctcggcctcccaaagtgctggaattacagtcatgagccacctctcccagccaacacagtctttctcttactgtgtgccacagtagtaatatctcttaatatgaaatgggctttctttaaaggcattttttcagagtggcaattgtatggaaaagttgactaattaaataatcaacagactgttaactcatctggagtaggggcattcttatattcacctgtgggtgcagattcctcagcatgtgctggctttcctgtacataccaattcacattattggttttttgtttttaaaataagactatggtcttgctgtgttgcctaagctggtctggaactcttgggctcacgcagtcttcccacctcagcttctgagcactgcaggcatgtgccaccctgcccagctattcctgttaggttctttggtaaagtgatggaaggatatgactgctaagcctacctcagcgttttgaaataatgtggtagtaaactgagaatgattttcaggaactgaattagcccatcattattaacataaatgagaactaagacaccactgacttctgtttctgacttgccattcttactgttctagcttgtccttaaggcctctgtgctttttaacaaatggtttcttttgcagttggagttctctccacagacactgtgttgctacggcaaacagttgtgcacaatacctcgtgatgccacttattacagttaccagaacaggtaagcttggccaggtgtggaccatggtccatgtgtccacatgtccagggagtgcatgcggatgggccagcacacatacagtcatggttcatgtgtatcttgcttgaagacagctgtatagcacaagttctgttttttgccttctgcctttgtttgcagaacaataaaattttctatcagagtagccttgcatcagttacctgggttcctcccaagagcttgagaagttaagcaactttgtgagttgttggcctagatgggtctatatcccaggccccacttctctttctactgtgtgtttgttgatcaccacagcctgaggcaaaactgagaagatttttaaacttttaactgaaactcgctagacagctttttggaaatatttcctttttagatgaggcctatccctaagtagttgttattagaatatatgaaaacaggattctggagtcttttctttgcctcatattaagcaaattaaaaggaaaacctcacatagctctctgtaccttacttttcccaacccagccttgtatgtgacagaggatgatttgagtctaataaacgaggcacctctgcctaattttctcctgcccaatcaatggctgtaatcacataaatctcattcactaatctatcttaaccacaatttgtctcctgttttcagtgatcagctacaagtatagcttgcattgggtgtttatttggggctctgatacaataataacaaggctggatgatattaataccctttatttgtttgttaataccaaatccatggtgttggtttttgctgaacttgtgtgttgcagatgcatttctagctttgaaaagtcacttaaactttttcttttatttacaaaaagttaggcgtgcttctaatgctttgtagacctaatgctttgattttgcagtgagtaaaaatctagctctttactcatttgaaacctagaaaaggtgggactcaagttgttataagtaccttatgtttaaaaaagcaagtaactggacatgaaacttttctcatgtttactaaaacagtagtctaaagtgtttatctttgcaccaagccatctttaatcaggtacctgcacacatcatttccttttgaaatgtatcacttgatggctgtagtcagtatttaactgcttgtgcaggcttttcaataaacagttttttttctttctttgttgagacagggtctcactctgtcactcaggctggagtgcagtggcgcaatcttagctcactgcaacctctgcctcccgggttcaagcgattctcctgcctcagccttccaaatagttgggattacaggtgtgtgccaccatgccttgcttatttttgtatttttagtagagacagggtttcagcatgttggccaggctggtctcgatctcctgacctcagatgatccaccctctcagccttccaaagtgctaggattataggtatgagccaccacgcctggcaatggttgttttagattattgttttctgcagttgtatctatagtgggcttttggggtggggggtgggggtctgtggttttttgttttgtaagtgggaagaggtgtgattcctgtatttaggtaatgagtagcagttcttctctccctggtatatttatccttcttcctccttttgattatttacatcacatagcgttaattgctgaaatgaaaggatatgggtctgtgtaattgaaacatttgcttttatttgcagtaatcatttgctacttgtgatcccatttgagatatttaatgctaatctgtgctttgccttggctttctgctttgtgttgttctgtcttgcttttatgttttttgttgtcttgcaatccctcatttcttcgtttgttttgtgtttttttttctccctcatgcttgtcgttgtctgcacttggctttgattgcaaaaaaaaaaacaaaaaaaaacaaaaaaacaaacaaaaaaaccaaaacccaaactgtggggcccatatatctgcatcattgaatgtccttgtcgccgttgatgacctgctctctgctcccgtccccctccttggcctgctgtgattggtggcttcgttgcttggcttgggctgtgttgtgtgaacggaacagttcaccccagtatggccttcttgccgacaggtatcatttctgtgagaagtgtttcaatgagatccaaggggagagcgtttctttgggggatgacccttcccagcctcaaacgtaagtaactgcattattttgaaaagtgctaattagtttgttgtccagtgattatgcacagcttatttctaaatgaacttaagctatgctgttgaatatggtagccattagccacatgttgctatttaaatgcatattaatttaaataaaaattgtttatcacatggaatactcacatttcaactgttcagtagctatctgtgtctggtggctaccatattggtcaacacagagaacatatccatcatagtagaaagctctttgagacatcaatgaattagggaatatgtcagcaatgggcaatcatcttagttctagtaaaagtattctgtataggaagcaatcagcttctcttcgaaaaattggaggttagtacaagaaaacatcattattaactgttctgagtttgagggtgattgaactgatgaccaccttacacccttctcttgtaggttaacagaagacccaagtcactattgtagtgaataatagactttaacagcatgccggggtttaagagatttgcttgtgctttgcagtctcacaagctcttaccatttggtaaatggccaagaaaaaaatttcaaacatatagtctaatagtttaatctctggccaggcgtggtggctcatgcctgtcatctcagcactttgggaggccaaggcgggcggatcacgaggtcaggagatcgagaccatcctggctaacacggtgaagccctgtctctactaaaaatacaaaaaattagccgggcatggtggtgggcgcctgtagtcccagctactcgggaggctgaggcaggagaacggcgtgaacccgggaggtggagcttgcagtgagctgagattgggccactgcattccagcctgggcgacagagcgagagtctgtctcaaaataaataaaagaaaaaaagaaaaaagtaacttaagatgtaggcagtcattagaattcaaactgggactgtctaagaaggaaaaactgttcagtgtaattttaatattattgaaagttcatatttacttctgttcaggacgttgcacaaaaatttggaattctcttgttcctagtaaaaatggggcttctgagaaaagctggttaatttttctaaattgcgttctaaagatagcagtgtctgggtgctagctaggagagtagatactaggagcctttgatccttgaaacattttgacatttggttaagccaggaaggttagctctagggtaagtttccttgatgcaggaagagacgtaagccttgtcattgaactctcaggtggcttaccaaatagtctaaaccttaaggcagtacatctctaactttgaaaagagtaggaacaagacccttcccaattctgcaggcctgtagtggatccaagtgtctatttctaactcccagattgttctggtgctgctcatcttcagattgcacttggagtagcaagacaggccattcaggaaaatgctattaacagagatgaatgaatctctaggccataactagtataagaaacggttttcaatgtggacatgtcctcatttttgtaaggaagtataacagaagtccaagttggtccccctaatgttgattctagttggagaatgtggatcctagttggagaatggtaagactgttagcttttgtatgtagtgaggctatgagcagtgtgttatgctgggtttcaggatgggaagccatgatacctaacaccaagaatagtaacagacaagattttaaaaggaaaagaagaaacagtatttctagttcttcctgggttctccatttctgataagaggaaatttatttactatgaagtcctatagaatattcctttacataaacatgcattttgtgtgagccaagaatacacctatttaaatgtgtattcttaaaaaacctgaatctctatatagggtgaagtttgttcctttggttagaacagcagtcagattgctcatctctatcactttttctcattgtgtcccttttctctccttagtacaataaataaagaacaattttccaagagaaaaaatgacacactggatcctgaactgtaagtacgatccccttgaatagtcagtacgctttggcttttctttttccctttcattctcttgaagtttgcatgaccaatcagatgatcctatattcttgggctaaatctacataacatacatctaatggatagtaaaaccatggaaaacactgaagtactaaggaacattatttcttaatgttaattttaatgttcttaatgttgaatgtgaaacattaaagatctaaacttctagtttgcagtgaggccttttagatcatggaggactgacatgtatgtcttctagatgttcctaaaatggatgggatggtatttggatttatttggaattttcagcaccaggaatctgtcttaaaaattagccaggttttggccgggcacggtggctcacgcctgtaatcccagcactttgggaggccgaggcgggcagatcacgaggtcaggagatcgagaccatcccggctaaaacggtgaaaccccgtctctactaaaaatacaaaaaattagccgggcgtagtggcgggcgcctgtagtcccagctacttgggaggctgaggcaggagaatggcgtgaacctgggaggcggagcttgcagtgagccgagatcccgccactgcactccagcctgggcgacagagcgagactccgtctcaaaaaaaaaaaaaaaaaaaaattagccaggtttggccgggcacagtggcccacatctgtaatcccagcactttgggaggccaaggcaggatcacccaaggtcaagagttcgagaccagcctggccaacatggcaaaatcccgtctctactacaaatatataaattagctgtgcgtggtggtgcgcgcctgtaatcccagctactcgggaggctgaggcaggagaatcgctggaacccgggaggcaggggttgaagtgagctgatatgacgccactgcactccagcctgggcgacacagagagactccatctcagaaaacaaaacaaaaaacagccaggcatgatagtatgtgcctatcctagccaggtagctgagaggccaaggcaggaaaatggcttgagcccaggagtttaaggttgtagtgagctgtgatcatgccacccactccagcctgtacaacagagaccctatctctaaaaaaatagaaactttattaaaactattttcagttctttggtcatgaccttggctgtctttgtcagaagtcatgggaaatattgcaagttttcatttggttaaggtttggggttaattttggaattggctctgctcttccaggtttgttgaatgtacagagtgcggaagaaagatgcatcagatctgtgtccttcaccatgagatcatctggcctgctgggtaagtcttaacgttgttactttctctggaatttttctttatcgtgaatattaacaagttttttattctatgcaattgactgtattatatcttcaaagttactatctttaaattgttttctttgggtttggccacgataattatagttcgctttttaaaaattaagtaacctagtatccaaaaatagatttttatcttatttttatgcattcttcttagccatataaatatattttattctgctggattgtttattaaaattatattgtagttattacacatcaaaagtaaatatttatggccaggcgaggtggctcacgcctgtaatcccagcactttgggaggccgaggcgggcggatcacctgaggacaggggttccagaccagcctgaccaacatggcaaaacctcgtgtctactgaaaatacaaaaattagcctggcgtggtggtgcacgcctgtaatccagctactcaggagggaggctgagggaagagaatcacttgaacctgtgagggggaggttgcagtgagctgagatcacgccactgcactccagcctgggtgacagagtgagactctgtctcaaagaaaaaagtaaatgcttttgttccggcatctagaaactaggatcatgctgctggcatgaataggtctggccctggtaagggtcaccatttggttagggcaggaacagcaagttataaggctgcagtcatagtgtaattgcctagtaaaagggaggggccatcgctctgtacaagaggaactaatcccagccatgttccaaaggaagcgggtatatgggacatccagtgcctctcattaagatgggatctccatctcttctgctctgttcttgggctgattgttgttcctgatttggaggttacaagaaagggcaggctaattgacagatttcacttttctttttttcaccgttattttcacatagaaaataacactaaggaaaataggtgatggtttagtggatactttattttcagtgtgacttgtcttttaagtgtgcctttttagtgctttccttaacagatttcgtaagaatgattaagagacttcttgtggttcttctaatttaggatcagtcaactgaatgaaaataatctgttattactgtgttaagcttgctttttcttaaaagtaatttatgttcattataaaatttgaatagtatgacagtttatgaagtaaaaagcgacggtctcagcttctctcttcccacccagattcctcactacaggaataacactcttttgtacatacaatcatacattttctttttttctttttttgagacagagtttcgctcttgttgcccaggctggagtgcagtggcgcgatctcggctcactgcaacctctgcctcccaggttcaagtgattctcctgcctcagcctccctagtagctgggattataggtgtgtgccaccatgcccggctaatttttgtattttggtagagacagggtttcatcatattggtcaggctggtcttgaactcccgacctcaggtgatccacccacctcggcctcccgaagtgctgggattacagcatgagccactgcacctggcacattttcttgatttatgtgtatttaatttttaatttttgtattttgttataagtcatagacttttttaattgagtctcactttcatcacccaggctggagtgcaatggtgtgatctcagctcactgcaacctccacctcctgggttcaggcaattctcctgcctcagcctctcctgcctcagcctctcgagtagctgggattacaggcacataccaccatgtctgaccaattcttgtatttttactagagacagggtttcattatgttggtcagggtggtcttgaactcctgacctcaaaagatccacccacctcgacctcccaaagtactgggattacaggcgggagccaccacgcctggctggtcatagacactcatttatgtctgctgcatttttaatggatgcatagtattctgtaacatactataatccatttatttacttggttgatgaacaagtttatacaagaaactacttaggagacaaatatcatgtgcatttgcagtagctgaatctattggttctactctcaaaatgtactttccaactagtagcatataggaaatgtcacctcttaggatttttctcccctatcacattagcaaaacctatcttgatttgtaatccttgatcatcttttcctgtgtaaaccaatttatatgcccttcatgtttcttcatgtctgttgcttgattttcaattatcttttttattcttactgatttctaaaagctctttgtgtattagttttattaactcttcattagaaatttagaaatacttctgctagattgtcttttgaattttaactttttgttagtataaattcaacggtttatctaagttgtgtaagcaaagttttggtttacatttagattcgtctgtgatggctgtttaaagaaaagtgcacgaactaggaaagaaaataagttttctgctaaaagtaagttttattcttaaaggtaaattttggcaaaacttatctgaagcctagataagaaaccatccaaagtgaattactttgtttttaatcacagtaatagagtaaaaataaaataattctataatctccttatagttgatctgtaatatattttttggtgtgaaatttattagaccaaagaaaaaaatttccaaggaacggatttgtagaatgcacaagatacgtgtttttcctgttcctatatttttccctatttggggcatttcataaaggaggaataaggtgtggaaatgattggccggaattgccatctctcagtttgtttatttattattttttattttattttttgagagtctcactctgtcccccaggctgcacagtgcagtggcacgatctcagctcactgcaacctccgcctcccaggttcatgtgatttttctgtcttagcctccagtgtagctgggactacaggcatgtgcctccacacccagctaatttttgtaatttattagagatggcgttttgccatgttggccaggctgatctcaaactcctgatcacaggtgatccacccaccttggcctcccaaagtactgggattacaggcgtgaaccaccatgcccaacccctcagttcacaccatttatatgggctaccttttggccttatgtgattgttttctactgtgccaggaggatgtcaaaaattttatcatgtaagtaattaacactaataatctaaatgtagtatttgatttagttttggggtgttttactgatctacagattattttgattcttgtaaggtttctcaaaatgctcaaccttcgttactttaaaatattactgcaatctaggcaaagtacatagagatgttcattgtttatatatttgtgtgtgtgtgtgtgtgtgtgtgtatatatatatatatatatatatatatatatatatatatatatatatatataatgtttggttggttgggttttttgttttttggaaacaaggtttcactgtgttgtccaggctgatcttgaactcctggattcaagcaatcctcccacctcagcctcccaaagtacaaggattaggattatgggtgtgagccttgtctcctggccattgttctatttctgtttgtttttgtttttttttttgtttttttttttttttttttttttttgagacagagtctcgctgtcgcccatagtggcgcagtctcagctcactgcagcctctgcctcccgggttcaagcgattctcgtgcctcagcctcccaagtagctggaattacaggcgtgcaccaccatgcctggctaatttttgtatttttagtagagacggggtttcagcatgttggccaggctggtctcgaactcctgacctcaggtgatgcgcccacctcagcctcccaaagtgctgggattacaggcatgagctaccgcacccggcccctgttctgtatttttataaactcttccaaaattggaaatttttcaaaatgagaagttggggaaaatgatatttagaaattattgagtactgtgtctgctttaatagcacatgtattaaaattagaatgatatgaagattagcatgttccctgcactcatatgacatgtaaatctgcaaagtagtgactactttgctatgattttttaaaatttcaccaagttatcctgtttgtattgaaaaaagtacaaatgagatttgaggttgaaccttaagactaacaacagtaaatttgcacctcagtaacttttaacttttacattcctagggttgccatctaccagacttggcacctttctagagaatcgtgtgaatgactttctgaggcgacagaatcaccctgagtcaggagaggtcactgttagagtagttcatgcttctgacaaaaccgtggaagtaaaaccaggcatgaaagcaaggtatctagtcatttcacttttcttctcctcgtggatccaaaattgctcatacatggttactattggtgattccagtctgaatgagttatgttgtggttcccccaccatctcaattgtataggtttgtggacagtggagagatggcagaatcctttccataccgaaccaaagccctctttgcctttgaagaaattgatggtgttgacctgtgcttctttggcatgcatgttcaagagtatggctctgactgccctccacccaaccagaggtatgactagctcacagtggctagctccggatttgtgtgggagttccaacttataataggtggaaaagcataacaggcaagaaaatgtttagtgtgtttggtttggaaatgcaaaatctcaagtgtccagtaattttaaagtgaaacagattaaaaagcaaacccccaaacaaaataaccgctcaatactgctcttctgtggtcatagtaataaaggatatgaatagcaacctgaaattggaatttgaaaacaaacgtactactcttcagaaaatgagcttaaatctggattaagtagctatgtgaaaatatatcatacaaatcgggtgggaatttcttttctccaaaaatagtataaaggcaataataaaaacgtatagggatcaccaaatactgattgatgtgtatgtgccaggcactgctagttactacaaatagaaggaaaccacaggctcactgaacttccctgaagggttcacggcggagtcgcctacctgcctgtgatgagcttcacaaataacgatgtgagcaaagagcctgggagagtgagagggtgttattaggcacatggagtaaagaactcattatgtgacctgactttttttttcctcttcatttctcttcattttgtataggagagtatacatatcttacctcgatagtgttcatttcttccgtcctaaatgcttgaggactgcagtctatcatgaaatcctaattggatatttagaatatgtcaagaaattagggtaagcatattttgataatggctttttttctttaactagcatggcattctggtgagatataggttaaatatgcaaatatataactcttggcctttttttcctcattttagttcttacgtaacaattctcttaactttgttggagcccctttgaagttaatgtcagtagagagaaatggatatgttggccctagtttcacccatccaacattagttttgtttgtaagctaagccattgggtccactttgctttgaagtttgatttgtgcccctcatttgagggcagaattttaactgcatttgatccttttacaacctgggtatgaagaccaaaaacagttctggagatacttcttacctttagagtatgtatgtcattggaaacattcactccctcatcttgaagtctgtttctctgaacagtgtgccttttaatttagctcttgttaaatgggtccattttcctttgcagtgtaatcttcatttggtcttaacatgcagacttagggtttttggatccagggctaagtcacccacttcgtggctgagattcgcaacatcccaccatggcctccaaaaataagtaggcaatatgagatccattgttactactgtgagttatgcctaattttggcctcacaatgttaatctcattctgggttatatatacactgtgttatcttgggaaaaattattggtatctatatcaactccaacttgtggtttaaaatgtagccttctagaatagattatctcttttccttaatgttctttctctttgtattgttagttacacaacagggcatatttgggcatgtccaccaagtgagggagatgattatatcttccattgccatcctcctgaccagaagatacccaagcccaagcgactgcaggaatggtacaaaaaaatgcttgacaaggctgtatcagagcgtattgtccatgactacaaggtcagttgggacataggggccaggtgctgacaatagatctggaaatgcactaatgttgctgctctttgttctgtcatttaacttttttttttttttttttttttttttgagacggagtctcgctctgtcacgcaggctggagtgcagtgacacgattttggctcacttcaagctccgcctcctgggttcatgccattctcctgcctcagcctcctgagtagctgggactacaggctcctgccatcacacccggctaaatttttttgtatttttagtagagacggggtttcaccgtgttagccaggatggtctcgatctcctgaccttgtgatccgcccgccttggcctcccaaagtgctgggattacaggcatgagccaccgtgcccagccttttttttttttttttaaacaaaagtcttgcttgttctacctcttgcatgtaattcctaaaaatgctaatttgattgcttttattttgtatattcaaaatttttcaatataagaaaaaccaggttttgaagagcggtagatcaagaaatccctgttttaaacatgtaaccaaaattttattttatttatttttggggggagggtggggatagagttggggtatcgccatgctgcccaggctggacttgaactcttggcctcaagcattccaaagtgctgggattacaggcatgagccactgtgcccggccttaaaatatatctttttgttttggttttttgttggtttggtttgggttggttagggttttaggggtgtgggtgttttgttttcagaaagggtcactctctgtcacccaggctagggtgcagtggcatgatacccgctcattgcaacctgtgcctcccaggctcaagccatcctcccatctcagcttcctgagttgctgggactaggtgcacactacgagagctagctgatttttgtatattttttgtagagacaggatgtcaccatgttgcccaggctggtctcaaactcctgagctcaagtgatctgcccacctcagcctcccaaagtgctaggattataggcatgagccacatcacccagccaaaaatatattctcccttttttttttttggacggagtttcaggctggagtgcaatggtgcagtctcctgggttcaagtgatggtcctacctcagcctcccgagtagctgggattacaggcatgcaccaccaagccaggctaattttttctatttttagtagagacggggtttctccacattggtcaggctggtctcgaactcctgacctcaggtgatccacctgcctcggcctcccaaagtgctgggattacaggtgtgagtcactgcacctggccaaaaatatattcttaattaacagtattatgttattcataaatataggttgtctcatgatacagacttgtcttcctcaatttagtagttcaactaaataaagaagttttcctaagcagcccagcaaatcattctgcagcagatactatttccagtatttgtagttttggtcattttgaacaaagctgtcagtaaaagctgctgaaattccaaggatgggtgtgaggagggcatgcttcataccacatattctgtgataaggagtggtaggggccatggcatgcatgatggtgctaccaccctgacgttgatcctggcaggataattgccacttggttatataaaggcagataagctccctgtttttgtgggtagaagaaatagaaaaccggaaatattgactttaggccaggccttttcactatttatttttctaaatactccctggcttacggcttaggtataaagtctctgccagctttcaagacattttaagctttcatgtttcttgtcagccatgattattctgtataatcaatgctttaaaagaacatagaaattcctatatgtacatgcatgttttcacaggatatttttaaacaagctactgaagatagattaacaagtgcaaaggaattgccttatttcgagggtgatttctggcccaatgttctggaagaaagcattaaggaactggaacaggaggaagaagagagaaaacgagaggaaaacaccagcaatgaaagcacagatgtaagggcattgagtttcctttgaaacttctatcatgattctaatatttaatccagaagtgcacttaaactttcaattgggttttaaagctttcaggtgtaaaagagctctttaagttggacaagaaatattggcttagagaggttattagggttctgtttcagtggtattaaacttttaaagcatcagagccccttttaaaatggcatctcagactttgagtaatgtgaaatgataaaagaaactgaaggaaatcctgaaaaactgatagaagattacttatctgaaggactaggttatgaatattataggccttgtgggtcacatatctctggcatattttctgtcttttaaaaacacactctttttaaatgtaaaaaaccattcttagctatacaaaataggcctgagccagaatttaagttactaagcctggcttagtaacctcaccagttatttccccatagcatatctcgaattacctccattgaatttaacttaacaaaaggcacccttaaatagtctgttaacaaactcttacagccttgtcatttagtatttgtaggctcataacattttagaatatgagtggaaggaaataaaaccaaggtcttctggctccccactttgatacactcttcactaccccaaagtgccaccccttccttgttccctagccccaatctgggatacattcaatcaatctacagggtctgcacattctgtggcctcttctaggcaaaaagctaaagggctgccattgccttaaagatcactgggagaaaattaggtcaaataacaactttaaggagaaagaataagtgaagagaacagctagtaaaataagttacaggcataagattatgatatctagtttcaaagaagggagatattctgtgctattcccaaattacttaacaaaaaccttattttcttgtctcctttgtgctactctgcaggtgaccaagggagacagcaaaaatgctaaaaagaagaataataagaaaaccagcaaaaataagagcagcctgagtaggggcaacaagaagaaacccgggatgcccaatgtatctaacgacctctcacagaaactatatgccaccatggagaagcataaagaggtaagatgcagccacccagagttggggaaaaacggcaagatttctggccaggcatggtggctcacacctgtaatcccagcactttgggaggccaaggcgggtggatcacctgaggtcaggagttcaagaccagcctgaccaacacggtgaaaccttgctctactaaaaatacaaaattagctgggcatggtggcacatgcctgtaatcccagctactcaggaggctgaggcaggagaattgcttgaacctgagaagcggagattgcagtgagccgaggtcactccattgcactccagcctgggcaacaagagcgaaactccacctcagaaaaagaaataagaaatgaataaaaacactgactgttcgctgggcgtggtggctcatgcctgtaatcccagcactttggaggttgaggcaggcggatcacttgaggtcaggagttggagaccagcctggccaacatggcgaaccgaaaccccgtctctactaaaaatacaaaaattagcctggcgtggtggcacacacctgtaatccttgggatgctggggtgggaggatcacttgaacctgggaggcagaggttgcagtgcacttacagcctgggtgacagaacgagactctgtttcaaaaaataaaaagatttaacctttctgaaagtgaattagtaaatagaattggagaaaagttaaacttccacatatggacttacaacccccttctcaaaactttttgagttatttcatcatttacattgtttagttgttcttgcagtcatttgggaaaataactgggtaaggttttttttttctctctttaatatcatataattgataacgaaagccaggagaattgaagagtaattcctctcagggtttgtccaatggtagtaatctcgattgttcagtcagactcctcattttactatctcggttctcagacatataatcaagttcttataggaagtggtaattaagttgagagggaaatgaaggcttgatttcaggttgtaattccgtacctaaaaattggttaaacagtctctttgggagagaaatagttaacaaaatcttttttagagaggaatttgttataatgatgttatcatggtgaacacctatatacataggtgttcaaagtatcttttcccccactgctccccccatcaccaccccttttttgttagcctagaataatgggctacgatgtaataatggtaataaccattatctcagccatgctagtgaaatggaaggattcctgagttctaatacgttaggtaatgattattaacaattaatagttactagctatttcaagcagtaagtaatgccacagaatcctaggcagttgggaaaagcccttagaatatattgtaataggtttgacttaaattgtggacacattccatggctgtttaaatttaggttgtaaatccaagtattggcctggttgtagggtgacagaagcagcgaacattgctggccagagactgtgagtgtggctgccagtgtgcacagatgttgaataatctgttatcagtacagcagtttctcacaagttcctaatttcttaaggggatgttttacattttattactttaataggtgtttatagttatatactaattaatgtcaaatacatatgtaataccagctttttataccttttacactaatggttatgagaattgatggttgttacaagttttttcaaacttcaatgaacaagaattttattgctttgtcaacaaagactaagattttttatccattccattcccttccaaacctgtaggaaaagttacacaggaaagttgcataggggaccttcatgagtccaggccagttgtttttcatactgtctccatatttggatttgtctggtttgttgtaattagattgaggttaaaccatggattgcatcttaaagtagactgccttgaggcaaaatgtccactgtgcatggtgctatacctcacccagaccattgttactctgaaggagttactgaatgaaggagaaaaaaatcacaggatgtgcatttcagttctatttatagtcagtctcaagagaccaaagaggtaaagcaggaaaaggaacaggaggcgtatggtggtgaaactaactcagcattcgccagtctcattggtgctcagcctgctgtacctgctcacacctgtaatcccagcactctgggaggctgaggcaggcagatcacttgagcttaggagtttgagaccagcctgggcaacatggcgaagcctcgtctctacaaaaaatgcagaaattagccaggtgtggtggtgtgggcctgtggtctcagctattcaggaggccatggtgggataattgcttgagcccaggaggcagaggttgtagtgagccaagatcacgccactgcattccagcctggatgacagagcgaggccctgtctcaaaaaaaagagactgtctgtttttcaggtcttctttgtgatccgcctcattgctggccctgctgccaactccctgcctcccattgttgatcctgatcctctcatcccctgcgatctgatggatggtcgggatgcgtttctcacgctggcaagggacaagcacctggagttctcttcactccgaagagcccagtggtccaccatgtgcatgctggtggagctgcacacgcagagccaggaccgctttgtctacacctgcaatgaatgcaagcaccatgtggagacacgctggcactgtactgtctgtgaggtaggcaccgggttgtgggaaggaggaggtgagctccgcagggttgttctgaggggccatgcagccacgtattttatagaggcctgtgggatgctaggggcttggcctcgtgtttgaggggcagagctgaagaggctagtttttgttctacgaaaggggcttttctagcccaaacaatatctaaaatacttttgaatgacttaaatcttggagagtttacgtgcacctcctgttttttccctaggattatgacttgtgtatcacctgctataacactaaaaaccatgaccacaaaatggagaaactaggccttggcttagatgatgagagcaacaaccagcaggctgcagccacccagagcccaggcgattctcgccgcctgagtatccagcgctgcatccagtctctggtccatgcttgccagtgtcggaatgccaattgctcactgccatcctgccagaagatgaagcgggttgtgcagcataccaagggttgcaaacggaaaaccaatggcgggtgccccatctgcaagcagctcattgccctctgctgctaccatgccaagcactgccaggagaacaaatgcccggtgccgttctgcctaaacatcaagcagaagctccggcagcaacagctgcagcaccgactacagcaggcccaaatgcttcgcaggaggatggccagcatgcagcggactggtgtggttgggcagcaacagggcctcccttcccccactcctgccactccaacgacaccaactggccaacagccaaccaccccgcagacgccccagcccacttctcagcctcagcctacccctcccaatagcatgccaccctacttgcccaggactcaagctgctggccctgtgtcccagggtaaggcagcaggccaggtgacccctccaacccctcctcagactgctcagccaccccttccagggcccccacctgcagcagtggaaatggcaatgcagattcagagagcagcggagacgcagcgccagatggcccacgtgcaaatttttcaaaggccaatccaacaccagatgcccccgatgactcccatggcccccatgggtatgaacccacctcccatgaccagaggtcccagtgggcatttggagccagggatgggaccgacagggatgcagcaacagccaccctggagccaaggaggattgcctcagccccagcaactacagtctgggatgccaaggccagccatgatgtcagtggcccagcatggtcaacctttgaacatggctccacaaccaggattgggccaggtaggtatcagcccactcaaaccaggcactgtgtctcaacaagccttacaaaaccttttgcggactctcaggtctcccagctctcccctgcagcagcaacaggtgcttagtatccttcacgccaacccccagctgttggctgcattcatcaagcagcgggctgccaagtatgccaactctaatccacaacccatccctgggcagcctggcatgccccaggggcagccagggctacagccacctaccatgccaggtcagcagggggtccactccaatccagccatgcagaacatgaatccaatgcaggcgggcgttcagagggctggcctgccccagcagcaaccacagcagcaactccagccacccatgggagggatgagcccccaggctcagcagatgaacatgaaccacaacaccatgccttcacaattccgagacatcttgagacgacagcaaatgatgcaacagcagcagcaacagggagcagggccaggaataggccctggaatggccaaccataaccagttccagcaaccccaaggagttggctacccaccacagcagcagcagcggatgcagcatcacatgcaacagatgcaacaaggaaatatgggacagataggccagcttccccaggccttgggagcagaggcaggtgccagtctacaggcctatcagcagcgactccttcagcaacagatggggtcccctgttcagcccaaccccatgagcccccagcagcatatgctcccaaatcaggcccagtccccacacctacaaggccagcagatccctaattctctctccaatcaagtgcgctctccccagcctgtcccttctccacggccacagtcccagcccccccactccagtccttccccaaggatgcagcctcagccttctccacaccacgtttccccacagacaagttccccacatcctggactggtagctgcccaggccaaccccatggaacaagggcattttgccagcccggaccagaattcaatgctttctcagcttgctagcaatccaggcatggcaaacctccatggtgcaagcgccacggacctgggactcagcaccgataactcagacttgaattcaaacctctcacagagtacactagacatacactagagacaccttgtagtattttgggagcaaaaaaattattttctcttaacaagactttttgtactgaaaacaatttttttgaatctttcgtagcctaaaagacaattttccttggaacacataagaactgtgcagtagccgtttgtggtttaaagcaaacatgcaagatgaacctgagggatgatagaatacaaagaatatatttttgttatggctggttaccaccagcctttcttcccctttgtgtgtgtggttcaagtgtgcactgggaggaggctgaggcctgtgaagccaaacaatatgctcctgccttgcacctccaataggttttattattttttttaaattaatgaacatatgtaatattaatagttattatttactggtgcagatggttgacatttttccctattttcctcactttatggaagagttaaaacatttctaaaccagaggacaaaaggggttaatgttactttaaaattacattctatatatatataaatatatataaatatatattaaaataccagttttttttctctgggtgcaaagatgttcattcttttaaaaaatgtttaaaaaaaaaaaaaaactgcctttcttcccctcaagtcaacttttgtgctccagaaaattttctattctgtaagtctgagcgtaaaacttcaagtattaaaataatttgtacatgtagagagaaaaatgactttttcaaaaatatacaggggcagctgccaaattgatgtattatatattgtggtttctgtttcttgaaagaatttttttcgttatttttacatctaacaaagtaaaaaaattaaaaagagggtaagaaacgattccggtgggatgattttaacatgcaaaatgtccctgggggtttcttctttgcttgctttcttcctccttaccctaccccccactcacacacacacacacacacacacacacacacacacacacacactttctataaaacttgaaaatagcaaaaaccctcaactgttgtaaatcatgcaattaaagttgattacttataaatatgaactttggatcactgtatagactgttaaatttgatttcttattacctattgttaaataaactgtgtgagacagacaccctgactttgtttcacttgataacacatctttgtcttggagtacacccgttttaagtgcctaatgcttaggattcagaggaaaaagtgaaagcattagcttatagcctctttaatctactacgtataatgtattcacaagtagatcttggtgaatttatccaaagttctgggaaaaagtactgcaggtaccagctaacagtcaaggtggaagtgataacctacttaacaccttgatacaggaccccttaaggatgacctcatggtcttccaatcaccttcatcttacagggatgagaaggaggacctaagaagacggatcatatctgcctaagtcccaagtaacttcttggaaaaaacaagacttgccaggcatggtggctcacgcctataatcccaacattttgggaggccaaggcaggcagatcacgaggtcaggagttcaagaccagcctggccaatatggtgaaacccccatctctactaaaaatcagcagggcgtggtggtgggcacctgccgtcccagctacttgggaggctgaggcaggagaatcagatcctggtggaggttgcagttagccaggatctcaccactgcactccaaagactccgtcttttaaaaacagagaagatgaagctaggggaacactcctgtttgctaactgaatacaaagaagtcagttggaatcgggttgaagggaaggaaaatgtgtggaaataaaacctagaaggctgagagagattacacatgagtccagtaatatgctagatgctcaaagaatggagagattattgatcctccatctgaacattgcagtagctgtgaacaagttgttaaaacaaatgtgttagtacactaaaaagtactgagctgctttggtatcaattccagatctttcttttatcacagagatttacactaaccatatatgactgctaaaggatttcagatacgttgacctgttgctactattttagtctgaaaacaaccagcatcttttttttttaagacagtctcgtcacccaggctggaatgcagtggcacaattgtagttcactgtagcctcaaactcatgggctgaagcagtcctcttacctcagcctccctagtagctgggactcaaaggtgtgtaccatcatgcctggctgactttttaaaatttttatagagacagggtcttgctatgttacccagtctggtctcgaactcctggactcaagtgatcctccaccttggcctcccaaattgctgggattacaggcatgagccaccttaccagcatcttaatgtgaggtgaactcactcagcattaatcagagccagccccagaaaatgtatctagtatcaagcatccagcatccacctgcttcagctcagtgaccccgcagatatccatggagcagctacatctgtgccaggccaggcagagcacacatgaacagcatgcagccctgccctcaacctaaccagcttaaggtctagaagacagcatgacaaagtacaaagcaccaagtgatctatgcaaggaatgcaagagggaatccatgaaagaaaacctagctgatgggaattggaaatgtttctggaaagggtagcatggaagctggatgttggaggagagataggaagaggaggagaggaggcggcgcccagaagagtgcaccacattctgctagggagcagctccaggtctacttggctgagacccgataaacggaagtagtgaacacctgttccagaaatacggccttccagctccctaagactaggggcccaggattcatgtgaataaaccctcaaaagggaaatgtttagaattccatcccatttccaagcagtaaattcccaggtttcaaagctctgcctctggctaaagacagccgggttgaagtgttagaccagtgcattcttactgcaatgatgaaagcaggaagtaggggcagaagtcattaaataggaaggaggctgggcacggtgactaacacctgtaatcgcaa

SEQ ID NO: 7 - DNA, 7582 bp, Homo sapiens
gccaggattgtctcgatctcttgacatcatgatccgcctgcctcggcctcccaaagtgctgggatttcaggcgtgagccactgcgcccggccactccagaatatttctaagcatgcttcctcacttccttcaggacttttctcagagaggccttccttgatgatcaatcctctataaaatggtaacctccacctctcttggtattcctgggccctctcaccctgctttaagttttttacagcaattgccaatatcataagttatctttatgtggagtatatattttttcttttttttgagacgtagtctcgctctgtcacccaggctggagtgcagtggcgtggtctcggctcactgcaagctccgcctcccgggttcacgccattctcctgcctcagcctcccgagtagctgggactacaggcacccgccaccacgcccggttaattttttgtattttttaatagagatggggtttcaccatgttagccaggatggtctcgatctcctgacctcgtgatctgccagcctcggcctcccaaagtgctggtattacaggtgtgagccactgcgcccggccatattttttcttttttctgagacagggtctttctgtgtcgcccaggctggagtgcagtggcccaatctcagctcacttcaatctctgcctcctg[450 bp omitted]aattgccaataccatgaattgtcttttgaggggttttctgtctccccgcaacttgaatgcaatcttcatgaggacagggactttatcccccaccccacccccacttttttttcttttttttttactgcaaaacctagaacagtgcttggcaggtagtaagtactcaatgaatgtttgttggatgaacccaataagtaaacaagatagaggacacatgtagggatctgcccgtgaacctcgacccctggctcctgagtctggcagtgggtgcagtggcagctcctgtctgtgagggccccagaggctggcagcaggatgcctccgtggaaaattcccttaacgcctttgcctctgcagctgttcctccgggatgatctctttgggggatcatgctcagatatttgtctcaaagagtcccaggccaaacctcagggacctcagagcgtttagaaaaataacacctctgtgagcttggtccaggcagatcccatgcagagaggagtttgtccccttccagtccccgaggtcctggctattgccagcatggagtgacctgtgtcacctctgagtgccaggcaagggttcagcagctgacgactcagcttctgcaggatgctggcagcatagccagcgagatagttggaagccgtcagggcacagggaaggggccgagggtgccctgagtgtgcatggggggcagccctgctgcagtccaagcctttgattcccaagctatgtgcacagtttcctctggactctgccatgtggcccagccacccatacctggaataggggctaagccaagctgctctctcctccaaagggaggcagcctgtgtgctttgtccgtttgcctttgcagagacctcgatcttcacgcaaggcaagcagcagcccctgtaagcacacgagacaatcccaagtgtcagtgggaaggagatccctttcctgatggggctgcctgtgtccagtccctcccagcttccccagggccctggggctctgcaggcattcagaagtggaagccagccacagcctgggactgaagaggttaatgtgcatctgcctccgaatgttaatgtgtctaggtgatgtcagtgggagccatgaagaagggagtggggagggcagttgggcttggaggcggcagcggctgccaggctacggaggaagacccccttcccaactgcggggcttgcgctccgggacaaggtggcaggcgctggaggctgccgcagcctgcgtgggtggaggggagctcagctcggttgtgggagcaggcgaccggcactggctggatggacctggaagcctcgctgctgcccactggtcccaacgccagcaacacctctgatggccccgataacctcacttcggcaggtgagttgactgggagccctccctcctctgggctgtgggtggaaaatgggaaggtttcacccctgagccaaactgcttgggaaactttatcacagttcttggggacaagatctgtggtctgctttgctctgaggggcaggagaaaagggggcaatggtccgcaggggcagacgggcaggagcagagcagggggcgaaggcatattcagaatggcaaggaaggggggccagccgtgagacagcaggggaaggctcgctgctgggttccaaagatgcttggcagaaaaaattccaggctggaaaagcaagcgagagaagctggagggtggtatgtgggagacagctgggggctcactcctgcactgttagcctcagctttttactcccacttggatgatgaggtctgagacatccttactgccacctgggagaggccctgggaagggaagacttcacagagccatgaggggattaacttttctggtgaattaagcttcctgacatttccagagctgcggtgccctgggattccagctttgaaggagaaaggaaggaaggaaaagaggaaaggcttatgtagataatttttccaggctgctgagctccaacagacagtttctgtctctgcttcactcaagaagcccaggctcagaagataccaatcaaggaaatccccgctaggaagcctggggtagggagagctgctggcttgaccagggcacagccggcaaaagcctctacaagacagtcacccacagatatgcccaagaatcagtacacagtttccaaccagagatctccaaaatgaaacactcagggctacacataggaaaagcacgcacacacacacacacacacatacacagacacttacttttgtgtccttctggctatgctgacgagttttcctggtgaagcccggggctcacagagtaatctctgcagacaactgtggttcttgcctctggtgcctgcaggaggcaggcatgttgtgtccttccaagacagatggctcagggcactctggtaggattcaccaggaaactcatggagaagggaaaagggacaagattagcaacagtgaagggagggagaatggtgggagaggattccagatgaacggtgggtcgctggaggctgagcatgccagcaggatgtcagttctcagagcaaagcccatgtcaaacagccaacgcttgctccttctgtccccaggatcacctcctcgcacggggagcatctcctacatcaacatcatcatgccttcggtgttcggcaccatctgcctcctgggcatcatcgggaactccacggtcatcttcgcggtcgtgaagaagtccaagctgcactggtgcaacaacgtccccgacatcttcatcatcaacctctcggtagtagatctcctctttctcctgggcatgcccttcatgatccaccagctcatgggcaatggggtgtggcactttggggagaccatgtgcaccctcatcacggccatggatgccaatagtcagttcaccagcacctacatcctgaccgccatggccattgaccgctacctggccactgtccaccccatctcttccacgaagttccggaagccctctgtggccaccctggtgatctgcctcctgtgggccctctccttcatcagcatcacccctgtgtggctgtatgccagactcatccccttcccaggaggtgcagtgggctgcggcatacgcctgcccaacccagacactgacctctactggttcaccctgtaccagtttttcctggcctttgccctgccttttgtggtcatcacagccgcatacgtgaggatcctgcagcgcatgacgtcctcagtggcccccgcctcccagcgcagcatccggctgcggacaaagagggtgacccgcacagccatcgccatctgtctggtcttctttgtgtgctgggcaccctactatgtgctacagctgacccagttgtccatcagccgcccgaccctcacctttgtctacttatacaatgcggccatcagcttgggctatgccaacagctgcctcaacccctttgtgtacatcgtgctctgtgagacgttccgcaaacgcttggtcctgtcggtgaagcctgcagcccaggggcagcttcgcgctgtcagcaacgctcagacggctgacgaggagaggacagaaagcaaaggcacctgatacttcccctgccaccctgcacacctccaagtcagggcaccacaacacgccaccgggagagatgctgagaaaaacccaagaccgctcgggaaatgcaggaaggccgggttgtgaggggttgttgcaatgaaataaatacattccatggggctcacacgttgctggggaggcctggagtcaggtttggggttttcagatatcagaaatccccttgggggagcaggatgagacctttggatagaacagaagctgagcaagagaacatgttggtttggataaccggttgcactatatctgtgagctctcaaatgtcttcttcccaaggcaagaggtggaagggtactgactgggtttgtttaaagtcaggcagggctggagtgagcagccagggccatgttgcacaaggcctgagagacgggaaagggcccgatcgctctttcccgcctctcactggtgcgatggaaggtggcctttctcccaagctggtggataatgaaaaataaagcatcccatctctcggcgttccagcatcctgtcaatttcccttttgctctagaggatgcatgtttatttgaggggatgtggcactgagcccacaggagtaaaagcccagtttgctaggaggtctgcttactgaaaacaaggagacctggggtgggtgtggttgggggtcttaaaactaataaaagctggggtcggggggcttttgcagctctggtgacattctctccacggggcacatttgctcagtcactaatccagcttgagtgtccgtgtgttctgcatgtgcaggggtcattctagtgcccggtgtgttggcatcatctttttgctctagcccttcctctccaaaataaaatcaaataaaggaaaatctccacccacatcactctggatgttcttgtggacttgggggtgggtgtgggctggggcggggaaggtgggcagcagaaaagagaaagaggggtcacttggttgtggaatttagatcttggttcatgctgcatttttaggaagcatgaagcagggatctgtttttctgaacccacagggaggattcagtggcataaatggaattactggggattcattagattttgcagttctgctgctgggcttgttcttgggactcagcttcctgtcttctgcacaaaatcccctgggctttgttgtcatcagtgatgagtcctcaggccccaagtcccaacccccactcccccgcctcaaccctcacccccgctgagtcaccagccgcagagccagctcttagggcagctgaagcctctctgctttctacagctgagatctggtgtgggcaccttgaacagaagattacagccggggccactgggaggcagccacgactgctgcttggctgctgcttcttggtgtcttcactgagaggggactgggagccgtcagtgcagtgctcagcagaccttactgagagagcgggagaaagctgcaagcatcctgaaagcaggggcagcagcacagcctgttcctcttcagagctgcagcagggagcctcttcagaaaacttctgggcagcttccttgggtcctggggactttttttttgagacagagtatcgctctgtcgcccaggctgaagtgcagtggtgtgatctctgctcactgcaagctccgcctcccgggttcacaccattctcctgcctcagcctcccgagtagctgggactgcaggcatccgccaccacgcccggctaatttttgtatttttagtaaagacggggtttcaccatgttagccaggatggtctcgatctcctaacctcatgatctgcctgcctcggcctcccaaggtgctgagactgcaggcgtaagccaccgtgcccggcttttttttttttttttttttttggacacagggccttgccctgttgcccaggctgtagtgcaggtgacatgatcacagctcactgcagcctcgacctcccagattcaagcaatcctcccacctcagcctcccaagtagctgggaccacaggcgcacaccatcatgcctggctaattttttatattttgtagagacaggatcttgccatgttgcccaggctggtctcaaactcctgggcccaaacaatcctcccaccttggcctcgtggaatgctgggattacaggcttgagccaccacatccggcccctggggagctctttatcacaatcattagtatttcctggcctgtgttcccctccacccagcacctggggagtaaagaagctgatggttattttccttactcactaacagtagggtctccagctgccacccgtaacttgaaatctattttagacgcacactcaataaaagaagattctggccaggcgcgacggctcacacctgtaatcccagcactttgggaggccgaggcaggtggatcacctgaggtcaggagttcgagaccagcctggccaacatggtgaaacctcatctgtactaaaaatacaaaaattagccaggcatggtggcacgtgcttgtagtcccagctacttgggaggctgagacaggagaaccacttgaacccaggaggcagaggttgcagtgagccgagattgcaccattgccctccagcctgggcaacaagagcgaaaactccatttaaaaaaaaagaaaaaaagaaagaaaaagaaaaaaggattcttagggaagccttgaggcaaatccaaaaagacccaattcctagccacaaacgtgataaaaggaggtcttcctgcatcgggtttgtctactggaaggcttccctgggtgtccatcagccccagcccctgcctgctcctcactccctctcaccttccagcactccaaggaggaatcccagagaggaaacaagtgagacggcctctcccagggaatgcacatcac

SEQ ID NO: 8 - DNA, 387 bp, Homo sapiens
atgactgaggctgatgtgaatccaaaggcctatccccttgccgatgcccacctcaccaagaagctactggacctcgttcagcagtcatgtaactataagcagcttcggaaaggagccaatgaggccaccaaaaccctcaacaggggcatctctgagttcatcgtgatggctgcagacgccgagccactggagatcattctgcacctgccgctgctgtgtgaagacaagaatgtgccctacgtgtttgtgcgctccaagcaggccctggggagagcctgtggggtctccaggcctgtcatcgcctgttctgtcaccatcaaagaaggctcgcagctgaaacagcagatccaatccattcagcagtccattgaaaggctcttagtctaa

SEQ ID NO: 9 - DNA, 1461 bp, Homo sapiens
atgtctgtcacatatgatgattccgttggagtagaagtgtccagcgacagcttctgggaggtcgggaactacaagcggactgtgaagcggatcgacgatggccaccgcctgtgcagcgacctcatgaactgcctgcatgagcgggcgcgcatcgagaaggcgtatgcgcagcagctcactgagtgggcccggcgctggaggcagcttgtggagaaagggccccagtacgggaccgtggagaaggcctggatggccttcatgtccgaggcagagagggtgagcgagctgcacctcgaggtgaaggcctcactgatgaacgatgacttcgagaagatcaagaactggcagaaggaagcctttcacaagcagatgatgggcggcttcaaggagaccaaggaagctgaggacggctttcggaaggcacagaagccctgggccaagaagctgaaagaggtagaagcagcaaagaaagcccaccatgcagcgtgcaaagaggagaagctggctatctcacgagaagccaacagcaaggcagacccatccttcaaccctgaacagctcaagaaattgcaagacaaaatagaaaagtgcaagcaagatgttcttaagaccaaagagaagtatgagaagtccctcaaggaactcgaccagggcacaccccagtacatggagaacatggagcaggtgtttgagcagtgccagcagttcgaggagaaacgccttcgcttcttccgggaggttctgctggaggttcagaagcacctaaacctgtccaatgtggctggttacaaagccatttaccatgacctggagcagagcatcagagcagctgatgcagtggaggacctgaggtggttccgagccaatcacgggccaggcatggccatgaactggccgcagtttgaggagtggtccgcagacctgattcgaaccctcagccggagagagaagaagaaggccactgacggcttcaccctgacgggcatcaaccagacaggcgaccagtttttgccgagtaagcccagcagcacccttaatgtcccgagcaaccccgcccagtctgcgcagtcacagtccagctacaaccccttcgaggatgaggacgacacgggcagcaccgtcagtgagaaggaggacattaaggccaaaaatgtgagcagctacgagaagacccagagctatcccaccgactggtcagacgatgagtctaacaaccccttctcctccacggatgccaatggggactcgaatccattcgacgacgacgccacctcggggacggaagtgcgagtccgggccctgtatgactatgaggggcaggagcatgatgagctgagcttcaaggctggggatgagctgaccaagatggaggacgaggatgagcagggctggtgcaagggacgcttggacaacgggcaagttggcctatacccggcaaattatgtggaggcgatccagtga

SEQ ID NO: 10 - DNA, 612 bp, Homo sapiens
atggctgagaacgccgcaccaggtctgatctcagagctgaagctggctgtgccctggggccacatcgcagccaaagcctggggctccctgcagggccctccagttctctgcctgcacggctggctggacaatgccagctccttcgacagactcatccctcttctcccgcaagacttttattacgttgccatggatttcggaggtcatgggctctcgtcccattacagcccaggtgtcccatattacctccagacttttgtgagtgagatccgaagagttgtggcagccttgaaatggaatcgattctccattctgggccacagcttcggtggcgtcgtgggcggaatgtttttctgtaccttccccgagatggtggataaacttatcttgctggacacgccgctctttctcctggaatcagatgaaatggagaacttgctgacctacaagcggagagccatagagcacgtgctgcaggtagaggcctcccaggagccctcgcacgtgttcagcctgaagcagctgctgcagaggcagagaacagcattgacttcgtcagcagggagctgtgtgcgcattccatcaggaagctgcaggcccatgtcctgttga

SEQ ID NO: 11 - DNA, 462 bp, Homo sapiens
atgacttcagagtcgacgtcacccccagttgtgcccccgctccactcccccaagtccccagtctggcccaccttccccttccacagggagggcagcagggtctgggagcggggtggtgtcccacctcgggacctacccagccctctgcccaccaagcggaccaggacctattcagcgacagcccgggcctcagctggccccgtgttcaagggcgtctgtaagcagttctcacgctcacagggccatggcttcatcacccccgagaacgggtccgaggacatcttcgtacatgtgtctgacatcgagggggagtacgtgccagtggagggcgacgaggtgacctacaagatgtgccctatccctcccaagaaccagaagttccaggccgtggaggtggtgctcactcagctggccccccacactccccacgagacgtggtctggccaggtcgtgggctcctag

SEQ ID NO: 12 - DNA, 3177 bp, Homo sapiens
atgaggaggaaaggacgatgtcatcgaggctctgcagcgaggcatccttcttccccatgcagtgttaaacactcccctacgcgagaaacgctgacctacgctcaagctcaaaggatggtagagatagaaattgaagggcgcttgcacaggatcagtatttttgatcccctggagatcatattggaagatgacctcactgctcaagagatgagtgagtgcaacagcaacaaggaaaacagcgagcggcctcctgtctgcttaagaactaagcgtcacaaaaacaacagagtcaaaaagaaaaacgaggccctccccagcgcccacggcacgccggcctcggccagtgccctcccggagcccaaggtgcgcatcgtggagtacagccctccgtccgcccccaggaggcctcctgtgtactacaagttcatcgagaagtcggccgaggaactggacaacgaggtggagtatgacatggacgaggaggactatgcctggctggagatcgtcaatgagaagcgcaagggcgactgcgtccccgccgtgtcgcagagcatgtttgagttcctgatggaccgcttcgagaaggagtcgcactgcgagaaccagaagcagggcgagcagcagtctctgatcgacgaggacgccgtgtgctgcatctgcatggacggggagtgtcagaacagcaacgtgatcctcttctgcgacatgtgcaacctggccgtgcaccaggagtgctacggggtgccctacatccccgagggccagtggctctgccgccactgcctgcagtcgcgggcccggcccgccgactgtgtgctgtgccccaacaagggtggtgccttcaaaaagacagatgacgaccgctggggtcacgtggtgtgtgccctgtggatcccagaggtcggctttgccaacacggtgttcatcgagcccatcgatggggtgaggaacatccctccagcccggtggaaactgacatgctacctctgtaagcagaagggcgtgggtgcctgcatccagtgccacaaagcaaactgctacacagcattccatgtgacgtgtgcccagaaggctggcctgtacatgaaaatggagcccgtgaaggaactgactggcggtggcaccaccttctccgtcagaaagaccgcttactgtgatgtccacacgcctccaggctgcacccggaggcctctgaatatttacggggatgtcgaaatgaaaaatggcgtctgtcgaaaagagagctcggttaaaacggtcaggtccacatccaaggtcaggaagaaggcaaaaaaggctaagaaagctctggctgagccctgcgcggtcctgccgaccgtgtgcgctccttatattcccccgcagaggttaaataggattgcgaatcaggtggccattcagcggaagaagcagtttgtggagcgagcccacagctactggctgctcaagcggctgtccaggaacggggcccccctgctgcggcggctgcagtccagcctgcagtctcagcgaagctcacagcagagagaaaatgatgaggagatgaaggctgccaaagagaagctgaagtactggcagcggctgcggcacgacctggagcgcgctcgcctgctgatcgagctgctgcgcaagcgggagaagctcaagcgtgagcaggtgaaggtggagcaggtcgccatggagctgcggctgaccccgctgacggtgctgctgcgctcagtgctggaccagctgcaagacaaggaccccgccaggatatttgcgcagcccgtgagtctgaaggaggtaccagattatttggatcacattaaacatcccatggactttgccacaatgaggaaacggttagaagctcaagggtataaaaacctccatgagtttgaggaggattttgatctcattatagataactgcatgaagtacaatgccagggacaccgtgttctatagagccgcggtgaggctgcgcgatcagggaggtgttgttctgaggcaggcccggcgcgaggtggacagcatcggcttggaagaggcctcggggatgcacctgcctgagcggcctgctgcggcaccgcggcggcctttctcctgggaagacgtggacaggttgctggaccccgccaacagagcccacctgggcctggaggagcagctgagagagctgctggacatgctcgacctcacctgcgctatgaagtccagcggctcccggagcaagcgggcaaagctgctcaaaaaggaaattgcccttctccgaaacaagctgagccagcagcacagccagcccctgcccacggggccaggcttggaaggcttcgaagaggacggagctgcgctggggccggaggcgggcgaggaagtccttccgaggttggagactcttctgcagccaaggaaaaggtcgcggagcacatgcggagactccgaggtggaggaggagtccccaggaaagcgcctggacgcaggtctcaccaacggctttgggggtgcgaggagcgagcaggagccgggcggcggcctggggaggaaggccacaccccgacgacgctgtgcctccgagtccagcatctcctccagcaacagcccgctctgcgactcgagctttaatgcgcccaaatgtgggcggggcaaaccggctcttgtgcgacggcacacgctggaggaccgcagtgagctgatctcctgcatcgagaatgggaactacgccaaggcggccaggatcgcagccgaagtcggccagagcagcatgtggatctccactgatgccgccgcctcggtgctggagcctctgaaggtggtgtgggccaagtgcagcggctacccctcctacccggcactgatcatcgaccccaagatgccccgtgtgcctggccaccacaacggcgtcaccatcccggccccacccctggacgtgctgaagattggggagcacatgcagaccaagtctgatgagaagctgttcctcgttctcttttttgataataagagaagttggcagtggcttcctaagtccaaaatggttccccttggtattgacgaaactatagacaagttaaagatgatggaagggaggaattccagcatccggaaggccgtgcggatcgcttttgaccgcgccatgaaccacctgagccgcgtccacggggagccgaccagcgacctcagtgacattgactga

SEQ ID NO: 13 - DNA, 7245 bp, Homo sapiens
atggccgagaatgtggtggaaccggggccgccttcagccaagcggcctaaactctcatctccggccctctcggcgtccgccagcgatggcacagattttggctctctatttgacttggagcacgacttaccagatgaattaatcaactctacagaattgggactaaccaatggtggtgatattaatcagcttcagacaagtcttggcatggtacaagatgcagcttctaaacataaacagctgtcagaattgctgcgatctggtagttcccctaacctcaatatgggagttggtggcccaggtcaagtcatggccagccaggcccaacagagcagtcctggattaggtttgataaatagcatggtcaaaagcccaatgacacaggcaggcttgacttctcccaacatggggatgggcactagtggaccaaatcagggtcctacgcagtcaacaggtatgatgaacagtccagtaaatcagcctgccatgggaatgaacacagggatgaatgcgggcatgaatcctggaatgttggctgcaggcaatggacaagggataatgcctaatcaagtcatgaacggttcaattggagcaggccgagggcgacagaatatgcagtacccaaacccaggcatgggaagtgctggcaacttactgactgagcctcttcagcagggctctccccagatgggaggacaaacaggattgagaggcccccagcctcttaagatgggaatgatgaacaaccccaatccttatggttcaccatatactcagaatcctggacagcagattggagccagtggccttggtctccagattcagacaaaaactgtactatcaaataacttatctccatttgctatggacaaaaaggcagttcctggtggaggaatgcccaacatgggtcaacagccagccccgcaggtccagcagccaggcctggtgactccagttgcccaagggatgggttctggagcacatacagctgatccagagaagcgcaagctcatccagcagcagcttgttctccttttgcatgctcacaagtgccagcgccgggaacaggccaatggggaagtgaggcagtgcaaccttccccactgtcgcacaatgaagaatgtcctaaaccacatgacacactgccagtcaggcaagtcttgccaagtggcacactgtgcatcttctcgacaaatcatttcacactggaagaattgtacaagacatgattgtcctgtgtgtctccccctcaaaaatgctggtgataagagaaatcaacagccaattttgactggagcacccgttggacttggaaatcctagctctctaggggtgggtcaacagtctgcccccaacctaagcactgttagtcagattgatcccagctccatagaaagagcctatgcagctcttggactaccctatcaagtaaatcagatgccgacacaaccccaggtgcaagcaaagaaccagcagaatcagcagcctgggcagtctccccaaggcatgcggcccatgagcaacatgagtgctagtcctatgggagtaaatggaggtgtaggagttcaaacgccgagtcttctttctgactcaatgttgcattcagccataaattctcaaaacccaatgatgagtgaaaatgccagtgtgccctccctgggtcctatgccaacagcagctcaaccatccactactggaattcggaaacagtggcacgaagatattactcaggatcttcgaaatcatcttgttcacaaactcgtccaagccatatttcctacgccggatcctgctgctttaaaagacagacggatggaaaacctagttgcatatgctcggaaagttgaaggggacatgtatgaatctgcaaacaatcgagcggaatactaccaccttctagctgagaaaatctataagatccagaaagaactagaagaaaaacgaaggaccagactacagaagcagaacatgctaccaaatgctgcaggcatggttccagtttccatgaatccagggcctaacatgggacagccgcaaccaggaatgacttctaatggccctctacctgacccaagtatgatccgtggcagtgtgccaaaccagatgatgcctcgaataactccacaatctggtttgaatcaatttggccagatgagcatggcccagccccctattgtaccccggcaaacccctcctcttcagcaccatggacagttggctcaacctggagctctcaacccgcctatgggctatgggcctcgtatgcaacagccttccaaccagggccagttccttcctcagactcagttcccatcacagggaatgaatgtaacaaatatccctttggctccgtccagcggtcaagctccagtgtctcaagcacaaatgtctagttcttcctgcccggtgaactctcctataatgcctccagggtctcaggggagccacattcactgtccccagcttcctcaaccagctcttcatcagaattcaccctcgcctgtacctagtcgtacccccacccctcaccatactcccccaagcataggggctcagcagccaccagcaacaacaattccagcccctgttcctacacctcctgccatgccacctgggccacagtcccaggctctacatccccctccaaggcagacacctacaccaccaacaacacaacttccccaacaagtgcagccttcacttcctgctgcaccttctgctgaccagccccagcagcagcctcgctcacagcagagcacagcagcgtctgttcctaccccaacagcaccgctgcttcctccgcagcctgcaactccactttcccagccagctgtaagcattgaaggacaggtatcaaatcctccatctactagtagcacagaagtgaattctcaggccattgctgagaagcagccttcccaggaagtgaagatggaggccaaaatggaagtggatcaaccagaaccagcagatactcagccggaggatatttcagagtctaaagtggaagactgtaaaatggaatctaccgaaacagaagagagaagcactgagttaaaaactgaaataaaagaggaggaagaccagccaagtacttcagctacccagtcatctccggctccaggacagtcaaagaaaaagattttcaaaccagaagaactacgacaggcactgatgccaactttggaggcactttaccgtcaggatccagaatcccttccctttcgtcaacctgtggaccctcagcttttaggaatccctgattactttgatattgtgaagagccccatggatctttctaccattaagaggaagttagacactggacagtatcaggagccctggcagtatgtcgatgatatttggcttatgttcaataatgcctggttatataaccggaaaacatcacgggtatacaaatactgctccaagctctctgaggtctttgaacaagaaattgacccagtgatgcaaagccttggatactgttgtggcagaaagttggagttctctccacagacactgtgttgctacggcaaacagttgtgcacaatacctcgtgatgccacttattacagttaccagaacaggtatcatttctgtgagaagtgtttcaatgagatccaaggggagagcgtttctttgggggatgacccttcccagcctcaaactacaataaataaagaacaattttccaagagaaaaaatgacacactggatcctgaactgtttgttgaatgtacagagtgcggaagaaagatgcatcagatctgtgtccttcaccatgagatcatctggcctgctggattcgtctgtgatggctgtttaaagaaaagtgcacgaactaggaaagaaaataagttttctgctaaaaggttgccatctaccagacttggcacctttctagagaatcgtgtgaatgactttctgaggcgacagaatcaccctgagtcaggagaggtcactgttagagtagttcatgcttctgacaaaaccgtggaagtaaaaccaggcatgaaagcaaggtttgtggacagtggagagatggcagaatcctttccataccgaaccaaagccctctttgcctttgaagaaattgatggtgttgacctgtgcttctttggcatgcatgttcaagagtatggctctgactgccctccacccaaccagaggagagtatacatatcttacctcgatagtgttcatttcttccgtcctaaatgcttgaggactgcagtctatcatgaaatcctaattggatatttagaatatgtcaagaaattaggttacacaacagggcatatttgggcatgtccaccaagtgagggagatgattatatcttccattgccatcctcctgaccagaagatacccaagcccaagcgactgcaggaatggtacaaaaaaatgcttgacaaggctgtatcagagcgtattgtccatgactacaaggatatttttaaacaagctactgaagatagattaacaagtgcaaaggaattgccttatttcgagggtgatttctggcccaatgttctggaagaaagcattaaggaactggaacaggaggaagaagagagaaaacgagaggaaaacaccagcaatgaaagcacagatgtgaccaagggagacagcaaaaatgctaaaaagaagaataataagaaaaccagcaaaaataagagcagcctgagtaggggcaacaagaagaaacccgggatgcccaatgtatctaacgacctctcacagaaactatatgccaccatggagaagcataaagaggtcttctttgtgatccgcctcattgctggccctgctgccaactccctgcctcccattgttgatcctgatcctctcatcccctgcgatctgatggatggtcgggatgcgtttctcacgctggcaagggacaagcacctggagttctcttcactccgaagagcccagtggtccaccatgtgcatgctggtggagctgcacacgcagagccaggaccgctttgtctacacctgcaatgaatgcaagcaccatgtggagacacgctggcactgtactgtctgtgaggattatgacttgtgtatcacctgctataacactaaaaaccatgaccacaaaatggagaaactaggccttggcttagatgatgagagcaacaaccagcaggctgcagccacccagagcccaggcgattctcgccgcctgagtatccagcgctgcatccagtctctggtccatgcttgccagtgtcggaatgccaattgctcactgccatcctgccagaagatgaagcgggttgtgcagcataccaagggttgcaaacggaaaaccaatggcgggtgccccatctgcaagcagctcattgccctctgctgctaccatgccaagcactgccaggagaacaaatgcccggtgccgttctgcctaaacatcaagcagaagctccggcagcaacagctgcagcaccgactacagcaggcccaaatgcttcgcaggaggatggccagcatgcagcggactggtgtggttgggcagcaacagggcctcccttcccccactcctgccactccaacgacaccaactggccaacagccaaccaccccgcagacgccccagcccacttctcagcctcagcctacccctcccaatagcatgccaccctacttgcccaggactcaagctgctggccctgtgtcccagggtaaggcagcaggccaggtgacccctccaacccctcctcagactgctcagccaccccttccagggcccccacctgcagcagtggaaatggcaatgcagattcagagagcagcggagacgcagcgccagatggcccacgtgcaaatttttcaaaggccaatccaacaccagatgcccccgatgactcccatggcccccatgggtatgaacccacctcccatgaccagaggtcccagtgggcatttggagccagggatgggaccgacagggatgcagcaacagccaccctggagccaaggaggattgcctcagccccagcaactacagtctgggatgccaaggccagccatgatgtcagtggcccagcatggtcaacctttgaacatggctccacaaccaggattgggccaggtaggtatcagcccactcaaaccaggcactgtgtctcaacaagccttacaaaaccttttgcggactctcaggtctcccagctctcccctgcagcagcaacaggtgcttagtatccttcacgccaacccccagctgttggctgcattcatcaagcagcgggctgccaagtatgccaactctaatccacaacccatccctgggcagcctggcatgccccaggggcagccagggctacagccacctaccatgccaggtcagcagggggtccactccaatccagccatgcagaacatgaatccaatgcaggcgggcgttcagagggctggcctgccccagcagcaaccacagcagcaactccagccacccatgggagggatgagcccccaggctcagcagatgaacatgaaccacaacaccatgccttcacaattccgagacatcttgagacgacagcaaatgatgcaacagcagcagcaacagggagcagggccaggaataggccctggaatggccaaccataaccagttccagcaaccccaaggagttggctacccaccacagcagcagcagcggatgcagcatcacatgcaacagatgcaacaaggaaatatgggacagataggccagcttccccaggccttgggagcagaggcaggtgccagtctacaggcctatcagcagcgactccttcagcaacagatggggtcccctgttcagcccaaccccatgagcccccagcagcatatgctcccaaatcaggcccagtccccacacctacaaggccagcagatccctaattctctctccaatcaagtgcgctctccccagcctgtcccttctccacggccacagtcccagcccccccactccagtccttccccaaggatgcagcctcagccttctccacaccacgtttccccacagacaagttccccacatcctggactggtagctgcccaggccaaccccatggaacaagggcattttgccagcccggaccagaattcaatgctttctcagcttgctagcaatccaggcatggcaaacctccatggtgcaagcgccacggacctgggactcagcaccgataactcagacttgaattcaaacctctcacagagtacactagacatacactag

SEQ ID NO: 14 - DNA, 1269 bp, Homo sapiens
atgtcagtgggagccatgaagaagggagtggggagggcagttgggcttggaggcggcagcggctgccaggctacggaggaagacccccttcccaactgcggggcttgcgctccgggacaaggtggcaggcgctggaggctgccgcagcctgcgtgggtggaggggagctcagctcggttgtgggagcaggcgaccggcactggctggatggacctggaagcctcgctgctgcccactggtcccaacgccagcaacacctctgatggccccgataacctcacttcggcaggatcacctcctcgcacggggagcatctcctacatcaacatcatcatgccttcggtgttcggcaccatctgcctcctgggcatcatcgggaactccacggtcatcttcgcggtcgtgaagaagtccaagctgcactggtgcaacaacgtccccgacatcttcatcatcaacctctcggtagtagatctcctctttctcctgggcatgcccttcatgatccaccagctcatgggcaatggggtgtggcactttggggagaccatgtgcaccctcatcacggccatggatgccaatagtcagttcaccagcacctacatcctgaccgccatggccattgaccgctacctggccactgtccaccccatctcttccacgaagttccggaagccctctgtggccaccctggtgatctgcctcctgtgggccctctccttcatcagcatcacccctgtgtggctgtatgccagactcatccccttcccaggaggtgcagtgggctgcggcatacgcctgcccaacccagacactgacctctactggttcaccctgtaccagtttttcctggcctttgccctgccttttgtggtcatcacagccgcatacgtgaggatcctgcagcgcatgacgtcctcagtggcccccgcctcccagcgcagcatccggctgcggacaaagagggtgacccgcacagccatcgccatctgtctggtcttctttgtgtgctgggcaccctactatgtgctacagctgacccagttgtccatcagccgcccgaccctcacctttgtctacttatacaatgcggccatcagcttgggctatgccaacagctgcctcaacccctttgtgtacatcgtgctctgtgagacgttccgcaaacgcttggtcctgtcggtgaagcctgcagcccaggggcagcttcgcgctgtcagcaacgctcagacggctgacgaggagaggacagaaagcaaaggcacctga

SEQ ID NO: 15 - DNA, 20 bp, Homo sapiens
agcagcataccaaagagatg

SEQ ID NO: 16 - DNA, 20 bp, Homo sapiens
acacatgaactagcactctc

SEQ ID NO: 17 - DNA, 22 bp, Homo sapiens
aatgctgcaggactccggaggc

SEQ ID NO: 18 - DNA, 18 bp, Homo sapiens
ttcaacggtgccaccacc

SEQ ID NO: 19 - DNA, 20 bp, Homo sapiens
atccattcagcagtccattg

SEQ ID NO: 20 - DNA, 51 bp, Homo sapiens
aactgactaaactaggtgccacgtcgtgaaacctgtaaaacagaacaaaaa

SEQ ID NO: 21 - DNA, 20 bp, Homo sapiens
tgtagggcttgagaaaatgc

SEQ ID NO: 22 - DNA, 19 bp, Homo sapiens
caggtgcagaatgatctcc

SEQ ID NO: 23 - DNA, 42 bp, Homo sapiens
aactgactaaactaggtgccacgcccctgttgagggttttgg

SEQ ID NO: 24 - DNA, 20 bp, Homo sapiens
ttacatgactgctgaacgag

SEQ ID NO: 25 - DNA, 20 bp, Homo sapiens
gtccattgttaactacctgg

SEQ ID NO: 26 - DNA, 18 bp, Homo sapiens
ctcagtctatggggggga

SEQ ID NO: 27 - DNA, 21 bp, Homo sapiens
cgaaccatattctagaccatc

SEQ ID NO: 28 - DNA, 20 bp, Homo sapiens
tcgactctgaagtcatggtg

SEQ ID NO: 29 - DNA, 20 bp, Homo sapiens
gagcccgtggctggtgaggc

SEQ ID NO: 30 - DNA, 19 bp, Homo sapiens
ccaagatgtgtgtgcaccc

SEQ ID NO: 31 - DNA, 17 bp, Homo sapiens
cggccccacttctcccc

SEQ ID NO: 32 - DNA, 20 bp, Homo sapiens
ccaggaaggagggccctgtc

SEQ ID NO: 33 - DNA, 20 bp, Homo sapiens
atcctccatctactagtagc

SEQ ID NO: 34 - DNA, 20 bp, Homo sapiens
gaagtacttggctggtcttc

SEQ ID NO: 35 - DNA, 50 bp, Homo sapiens
aactgactaaactaggtgccacgtcgtgaacagatacgcagccggaggat

SEQ ID NO: 36 - DNA, 21 bp, Homo sapiens
atggttactattggtgattcc

SEQ ID NO: 37 - DNA, 20 bp, Homo sapiens
tcggtatggaaaggattctg

SEQ ID NO: 38 - DNA, 60 bp, Homo sapiens
aactgactaaactaggtgccacgtcgtgaaagtctgacaagttatgttgtggttccccca

SEQ ID NO: 39 - DNA, 21 bp, Homo sapiens
ggagatattctgtgctattcc

SEQ ID NO: 40 - DNA, 19 bp, Homo sapiens
tgctgtctcccttggtcac

SEQ ID NO: 41 - DNA, 38 bp, Homo sapiens
actgactaaactaggtgcaaaccttattttcttgtctc

SEQ ID NO: 42 - DNA, 20 bp, Homo sapiens
caaccataaccagttccagc

SEQ ID NO: 43 - DNA, 21 bp, Homo sapiens
catatttccttgttgcatctg

SEQ ID NO: 44 - DNA, 35 bp, Homo sapiens
aactgactaaactagagttggctacccaccacagc

SEQ ID NO: 45 - DNA, 18 bp, Homo sapiens
cagcagtcagtgggacag

SEQ ID NO: 46 - DNA, 19 bp, Homo sapiens
tcttaggagacagtcgtgc

SEQ ID NO: 47 - DNA, 58 bp, Homo sapiens
aactgactaaactaggtgccacgtcgtgaaagtctgacttgcacaggataatcttaca

SEQ ID NO: 48 - DNA, 18 bp, Homo sapiens
tgagtagagaggcggctc

SEQ ID NO: 49 - DNA, 20 bp, Homo sapiens
gattaccttccctgaacttc

SEQ ID NO: 50 - DNA, 38 bp, Homo sapiens
aactgactaaactaggtggcgagcggctttgggagagt

SEQ ID NO: 51 - DNA, 19 bp, Homo sapiens
atccgccgattccactaac

SEQ ID NO: 52 - DNA, 19 bp, Homo sapiens
acgagtgacacgattgagg

SEQ ID NO: 53 - DNA, 22 bp, Homo sapiens
aaggagttctgagaatccgtag

SEQ ID NO: 54 - DNA, 19 bp, Homo sapiens
tacctggtcctatcggatg

SEQ ID NO: 55 - DNA, 19 bp, Homo sapiens
tttccatggtggtcactgc

SEQ ID NO: 56 - DNA, 27 bp, Homo sapiens
aactgacacaggccctccacacgcaca

SEQ ID NO: 57 - DNA, 21 bp, Homo sapiens
tctttccacaaagtaccattc

SEQ ID NO: 58 - DNA, 20 bp, Homo sapiens
tccaagttttctaggaaccc

SEQ ID NO: 59 - DNA, 39 bp, Homo sapiens
aactgactaaactaggtgcgtgacgccagcagcacggcc

SEQ ID NO: 60 - DNA, 19 bp, Homo sapiens
gaggtacatgcgtgtagtc

SEQ ID NO: 61 - DNA, 19 bp, Homo sapiens
gctgacacagatgtggttg

SEQ ID NO: 62 - DNA, 36 bp, Homo sapiens
aactgactaaactagggcactccagcctgggtgaca

SEQ ID NO: 63 - DNA, 17 bp, Homo sapiens
acacggtcggcaggacc

SEQ ID NO: 64 - DNA, 20 bp, Homo sapiens
aaagaccgcttactgtgatg

SEQ ID NO: 65 - DNA, 26 bp, Homo sapiens
aactgacagacgccatttttcatttc

SEQ ID NO: 66 - DNA, 18 bp, Homo sapiens
aacaggacatgggcctgc

SEQ ID NO: 67 - DNA, 20 bp, Homo sapiens
ccttgtgacgagaattcacc

SEQ ID NO: 68 - DNA, 50 bp, Homo sapiens
aactgactaaactaggtgccacgtcgtgaaaacagcattgacttcgtcag

SEQ ID NO: 69 - DNA, 20 bp, Homo sapiens
tttagccattttgaccaggc

SEQ ID NO: 70 - DNA, 19 bp, Homo sapiens
ctggtctcgaactctcaac

SEQ ID NO: 71 - DNA, 58 bp, Homo sapiens
aactgactaaactaggtgccacgtcgtgaaagtctgacaatcccagcattttgggagg

SEQ ID NO: 72 - DNA, 20 bp, Homo sapiens
tgtgtctttcaggtctgatc

SEQ ID NO: 73 - DNA, 19 bp, Homo sapiens
gaagagggatgagtctgtc

SEQ ID NO: 74 - DNA, 47 bp, Homo sapiens
aactgactaaactaggtgccacgtcgtcggctggctggacaatgcca

SEQ ID NO: 75 - DNA, 20 bp, Homo sapiens
aagcatggttcctcacttcc

SEQ ID NO: 76 - DNA, 20 bp, Homo sapiens
agatccctacatgtgtcctc

SEQ ID NO: 77 - DNA, 31 bp, Homo sapiens
aactgactaaagaggggttttctgtctcccc

SEQ ID NO: 78 - DNA, 20 bp, Homo sapiens
aagcatggttcctcacttcc

SEQ ID NO: 79 - DNA, 20 bp, Homo sapiens
agatccctacatgtgtcctc

SEQ ID NO: 80 - DNA, 18 bp, Homo sapiens
atcccccaccccaccccc

SEQ ID NO: 81 - DNA, 18 bp, Homo sapiens
cctgagtctggcagtggg

SEQ ID NO: 82 - DNA, 17 bp, Homo sapiens
caccctcggccccttcc

SEQ ID NO: 83 - DNA, 35 bp, Homo sapiens
aactgactaaactagtcagatatttgtctcaaaga

SEQ ID NO: 84 - DNA, 19 bp, Homo sapiens
ggagctcagctcggttgtg

SEQ ID NO: 85 - DNA, 18 bp, Homo sapiens
gctctgctcctgcccgtc

SEQ ID NO: 86 - DNA, 47 bp, Homo sapiens
aactgactaaactaggtgccacgtcgtctgctgcccactggtcccaa

SEQ ID NO: 87 - protein, 128 aa, Homo sapiens
MTEADVNPKAYPLADAHLTKKLLDLVQQSCNYKQLRKGANEATKTLNRGISEFIVMAADAEPLEIILHLPLLCEDKNVPYVFVRSKQALGRACGVSRPVIACSVTIKEGSQLKQQIQSIQQSIERLLV

SEQ ID NO: 88 - protein, 486 aa, Homo sapiens
MSVTYDDSVGVEVSSDSFWEVGNYKRTVKRIDDGHRLCSDLMNCLHERARIEKAYAQQLTEWARRWRQLVEKGPQYGTVEKAWMAFMSEAERVSELHLEVKASLMNDDFEKIKNWQKEAFHKQMMGGFKETKEAEDGFRKAQKPWAKKLKEVEAAKKAHHAACKEEKLAISREANSKADPSFNPEQLKKLQDKIEKCKQDVLKTKEKYEKSLKELDQGTPQYMENMEQVFEQCQQFEEKRLRFFREVLLEVQKHLNLSNVAGYKAIYHDLEQSIRAADAVEDLRWFRANHGPGMAMNWPQFEEWSADLIRTLSRREKKKATDGFTLTGINQTGDQFLPSKPSSTLNVPSNPAQSAQSQSSYNPFEDEDDTGSTVSEKEDIKAKNVSSYEKTQSYPTDWSDDESNNPFSSTDANGDSNPFDDDATSGTEVRVRALYDYEGQEHDELSFKAGDELTKMEDEDEQGWCKGRLDNGQVGLYPANYVEAIQ

SEQ ID NO: 89 - protein, 203 aa, Homo sapiens
MAENAAPGLISELKLAVPWGHIAAKAWGSLQGPPVLCLHGWLDNASSFDRLIPLLPQDFYYVAMDFGGHGLSSHYSPGVPYYLQTFVSEIRRVVAALKWNRFSILGHSFGGVVGGMFFCTFPEMVDKLILLDTPLFLLESDEMENLLTYKRRAIEHVLQVEASQEPSHVFSLKQLLQRQRTALTSSAGSCVRIPSGSCRPMSC

SEQ ID NO: 90 - protein, 153 aa, Homo sapiens
MTSESTSPPVVPPLHSPKSPVWPTFPFHREGSRVWERGGVPPRDLPSPLPTKRTRTYSATARASAGPVFKGVCKQFSRSQGHGFITPENGSEDIFVHVSDIEGEYVPVEGDEVTYKMCPIPPKNQKFQAVEVVLTQLAPHTPHETWSGQVVGS

SEQ ID NO: 91 - protein, 1058 aa, Homo sapiens
MRRKGRCHRGSAARHPSSPCSVKHSPTRETLTYAQAQRMVEIEIEGRLHRISIFDPLEIILEDDLTAQEMSECNSNKENSERPPVCLRTKRHKNNRVKKKNEALPSAHGTPASASALPEPKVRIVEYSPPSAPRRPPVYYKFIEKSAEELDNEVEYDMDEEDYAWLEIVNEKRKGDCVPAVSQSMFEFLMDRFEKESHCENQKQGEQQSLIDEDAVCCICMDGECQNSNVILFCDMCNLAVHQECYGVPYIPEGQWLCRHCLQSRARPADCVLCPNKGGAFKKTDDDRWGHVVCALWIPEVGFANTVFIEPIDGVRNIPPARWKLTCYLCKQKGVGACIQCHKANCYTAFHVTCAQKAGLYMKMEPVKELTGGGTTFSVRKTAYCDVHTPPGCTRRPLNIYGDVEMKNGVCRKESSVKTVRSTSKVRKKAKKAKKALAEPCAVLPTVCAPYIPPQRLNRIANQVAIQRKKQFVERAHSYWLLKRLSRNGAPLLRRLQSSLQSQRSSQQRENDEEMKAAKEKLKYWQRLRHDLERARLLIELLRKREKLKREQVKVEQVAMELRLTPLTVLLRSVLDQLQDKDPARIFAQPVSLKEVPDYLDHIKHPMDFATMRKRLEAQGYKNLHEFEEDFDLIIDNCMKYNARDTVFYRAAVRLRDQGGVVLRQARREVDSIGLEEASGMHLPERPAAAPRRPFSWEDVDRLLDPANRAHLGLEEQLRELLDMLDLTCAMKSSGSRSKRAKLLKKEIALLRNKLSQQHSQPLPTGPGLEGFEEDGAALGPEAGEEVLPRLETLLQPRKRSRSTCGDSEVEEESPGKRLDAGLTNGFGGARSEQEPGGGLGRKATPRRRCASESSISSSNSPLCDSSFNAPKCGRGKPALVRRHTLEDRSELISCIENGNYAKAARIAAEVGQSSMWISTDAAASVLEPLKVVWAKCSGYPSYPALIIDPKMPRVPGHHNGVTIPAPPLDVLKIGEHMQTKSDEKLFLVLFFDNKRSWQWLPKSKMVPLGIDETIDKLKMMEGRNSSIRKAVRIAFDRAMNHLSRVHGEPTSDLSDID

SEQ ID NO: 92 - protein, 2414 aa, Homo sapiens
MAENVVEPGPPSAKRPKLSSPALSASASDGTDFGSLFDLEHDLPDELINSTELGLTNGGDINQLQTSLGMVQDAASKHKQLSELLRSGSSPNLNMGVGGPGQVMASQAQQSSPGLGLINSMVKSPMTQAGLTSPNMGMGTSGPNQGPTQSTGMMNSPVNQPAMGMNTGMNAGMNPGMLAAGNGQGIMPNQVMNGSIGAGRGRQNMQYPNPGMGSAGNLLTEPLQQGSPQMGGQTGLRGPQPLKMGMMNNPNPYGSPYTQNPGQQIGASGLGLQIQTKTVLSNNLSPFAMDKKAVPGGGMPNMGQQPAPQVQQPGLVTPVAQGMGSGAHTADPEKRKLIQQQLVLLLHAHKCQRREQANGEVRQCNLPHCRTMKNVLNHMTHCQSGKSCQVAHCASSRQIISHWKNCTRHDCPVCLPLKNAGDKRNQQPILTGAPVGLGNPSSLGVGQQSAPNLSTVSQIDPSSIERAYAALGLPYQVNQMPTQPQVQAKNQQNQQPGQSPQGMRPMSNMSASPMGVNGGVGVQTPSLLSDSMLHSAINSQNPMMSENASVPSLGPMPTAAQPSTTGIRKQWHEDITQDLRNHLVHKLVQAIFPTPDPAALKDRRMENLVAYARKVEGDMYESANNRAEYYHLLAEKIYKIQKELEEKRRTRLQKQNMLPNAAGMVPVSMNPGPNMGQPQPGMTSNGPLPDPSMIRGSVPNQMMPRITPQSGLNQFGQMSMAQPPIVPRQTPPLQHHGQLAQPGALNPPMGYGPRMQQPSNQGQFLPQTQFPSQGMNVTNIPLAPSSGQAPVSQAQMSSSSCPVNSPIMPPGSQGSHIHCPQLPQPALHQNSPSPVPSRTPTPHHTPPSIGAQQPPATTIPAPVPTPPAMPPGPQSQALHPPPRQTPTPPTTQLPQQVQPSLPAAPSADQPQQQPRSQQSTAASVPTPTAPLLPPQPATPLSQPAVSIEGQVSNPPSTSSTEVNSQAIAEKQPSQEVKMEAKMEVDQPEPADTQPEDISESKVEDCKMESTETEERSTELKTEIKEEEDQPSTSATQSSPAPGQSKKKIFKPEELRQALMPTLEALYRQDPESLPFRQPVDPQLLGIPDYFDIVKSPMDLSTIKRKLDTGQYQEPWQYVDDIWLMFNNAWLYNRKTSRVYKYCSKLSEVFEQEIDPVMQSLGYCCGRKLEFSPQTLCCYGKQLCTIPRDATYYSYQNRYHFCEKCFNEIQGESVSLGDDPSQPQTTINKEQFSKRKNDTLDPELFVECTECGRKMHQICVLHHEIIWPAGFVCDGCLKKSARTRKENKFSAKRLPSTRLGTFLENRVNDFLRRQNHPESGEVTVRVVHASDKTVEVKPGMKARFVDSGEMAESFPYRTKALFAFEEIDGVDLCFFGMHVQEYGSDCPPPNQRRVYISYLDSVHFFRPKCLRTAVYHEILIGYLEYVKKLGYTTGHIWACPPSEGDDYIFHCHPPDQKIPKPKRLQEWYKKMLDKAVSERIVHDYKDIFKQATEDRLTSAKELPYFEGDFWPNVLEESIKELEQEEEERKREENTSNESTDVTKGDSKNAKKKNNKKTSKNKSSLSRGNKKKPGMPNVSNDLSQKLYATMEKHKEVFFVIRLIAGPAANSLPPIVDPDPLIPCDLMDGRDAFLTLARDKHLEFSSLRRAQWSTMCMLVELHTQSQDRFVYTCNECKHHVETRWHCTVCEDYDLCITCYNTKNHDHKMEKLGLGLDDESNNQQAAATQSPGDSRRLSIQRCIQSLVHACQCRNANCSLPSCQKMKRVVQHTKGCKRKTNGGCPICKQLIALCCYHAKHCQENKCPVPFCLNIKQKLRQQQLQHRLQQAQMLRRRMASMQRTGVVGQQQGLPSPTPATPTTPTGQQPTTPQTPQPTSQPQPTPPNSMPPYLPRTQAAGPVSQGKAAGQVTPPTPPQTAQPPLPGPPPAAVEMAMQIQRAAETQRQMAHVQIFQRPIQHQMPPMTPMAPMGMNPPPMTRGPSGHLEPGMGPTGMQQQPPWSQGGLPQPQQLQSGMPRPAMMSVAQHGQPLNMAPQPGLGQVGISPLKPGTVSQQALQNLLRTLRSPSSPLQQQQVLSILHANPQLLAAFIKQRAAKYANSNPQPIPGQPGMPQGQPGLQPPTMPGQQGVHSNPAMQNMNPMQAGVQRAGLPQQQPQQQLQPPMGGMSPQAQQMNMNHNTMPSQFRDILRRQQMMQQQQQQGAGPGIGPGMANHNQFQQPQGVGYPPQQQQRMQHHMQQMQQGNMGQIGQLPQALGAEAGASLQAYQQRLLQQQMGSPVQPNPMSPQQHMLPNQAQSPHLQGQQIPNSLSNQVRSPQPVPSPRPQSQPPHSSPSPRMQPQPSPHHVSPQTSSPHPGLVAAQANPMEQGHFASPDQNSMLSQLASNPGMANLHGASATDLGLSTDNSDLNSNLSQSTLDIH

SEQ ID NO: 93 - protein, 422 aa, Homo sapiens
MSVGAMKKGVGRAVGLGGGSGCQATEEDPLPNCGACAPGQGGRRWRLPQPAWVEGSSARLWEQATGTGWMDLEASLLPTGPNASNTSDGPDNLTSAGSPPRTGSISYINIIMPSVFGTICLLGIIGNSTVIFAVVKKSKLHWCNNVPDIFIINLSVVDLLFLLGMPFMIHQLMGNGVWHFGETMCTLITAMDANSQFTSTYILTAMAIDRYLATVHPISSTKFRKPSVATLVICLLWALSFISITPVWLYARLIPFPGGAVGCGIRLPNPDTDLYWFTLYQFFLAFALPFVVITAAYVRILQRMTSSVAPASQRSIRLRTKRVTRTAIAICLVFFVCWAPYYVLQLTQLSISRPTLTFVYLYNAAISLGYANSCLNPFVYIVLCETFRKRLVLSVKPAAQGQLRAVSNAQTADEERTESKGT

SEQ ID NO: 94 - DNA, 185857 bp, Homo sapiens
  misc_feature (7370)..(17469): n is a, c, g, or t
atgagccagaggtgaagaactgcttcgtggatggcctctcccctggccggctgctgggcaccgcgagccaggtcaggcagacagcatcaagcttagtggctggtcctgactctgcccttgactttttagttgatgttagaccagtcaccatgcctctataagcctcagtttccccagatgcatactgattgccttgatctatctgacctccaagagcccttcagggccaggcctctttcccttcctggcacgtcaatactggtgcaaggaggagacagccttcatgtgaaccacatgcaccgcgggcaccagcactgcccccaccctgcacaggtcaggagagaggttcagggtcccaggaagcttaggccccgattcctgcccactgctcttttctggtcatttgaaattgaatttcaaattcaattcaggcaaaaataccttgaggcccaccacactggtcttggtactgggctctggggcgaacccctgacgaggacacctgtgccccctgctctggggagcggggttggggagcaaaagtggcctaaaacaaagaccctttcttcctagaggcgggaagggaggcagtgcagggaggcatccgtttgtttcctctggaacggaacgtgggcattaacagtgcgcccacgctcttgggtgcagggcagctggctggagggtggtacacagtaggggcaggtgtgagtgtgtttgtgtgtgtttccaggcagatgtgccgttttcagaagccgcgggaccagcctcctccgagccctcccagccgctggtcgggcccggctggggcggtacctgggcctggggtttccctgtctctcctggggccttgggtgcgagggaggctgggcgccactcgaggccccgcgtccggtctcccgcgccagcagggccggctctgcagtgaggcccctgcgcacctaggtggagcccgacccgcagttttcggctgggccggccccacctgacccgccggcgcgccaggcgggggcgctgcagggcggggtccccggggtccctcgcggcccagtgcgcatccgcggctccgcggccgggaggagcgcagacggcggcgggcgcgggccggagtccgaggctgcgcgggcccggccacctgggccggcagcgactgcgccgcgctccccctcccgccgcctcccccgaggagccggcgccgagccgagcgggcgggcgcgcgcctccaggccggagcagcggcgtcccgcgggcggcgaggcgcgcagcgtcgccggccccacctgtaggcgcggcagccaccggcaccggcaccgacaccggcagcggcggcccagcgtgggcagcccaggggcgcggtgggcccggacctagtcccggccgcggcggcggaggcgcgggctgctgggagcgcagaggccggcaccgtccggtggggaccggcccgccagccccgggccgcgcaagttcgatcgccgcgggctcggccgggccgcgcggaccccggcggcggcgatggtgcggcagccccgcgcccggcgcgcagccccggccccgagcctggcccgccgcggcggcggtggcggcggcggcgcggcggccccctgagccccgggccggagcgagcgcgggcggcggaggaggcggcggcggcggaggaagaggaggaggaggaaggcgacgccgagcagcgggcggtgggggccgacaggcggaggagggggccggggccgcgccggaccccccccccccccgcgccgcccggccgttgcgcaatccgcggcccgccgtccgggccctgctggcggtgcggctccgggggcggcggcggggctgattcatggggccgcggcggccgccccccggcgccccgcagccagcgatggtggccgagtggtcggagcggcggccgccgcggcccgagactttctgctaacctccccgcccccgcccgccccctccgcggcgcccccctccccccgcccgctcccctcccccctgcccagaaagacacaaatcgcctcccggagtggcgcctccagtcgcggcggagcgcggcgttggcggcggatggagggcgcgagcgggcggccgcggaggctgcacccggcggggcgctgatgcggcgcctggaccttcgctgcgcgacttcgggggcgtcggccgagttgggactccgcgatgcagctcctgaaggcgctctgggcactggcaggggccgcgctctgctgcttcctcgtcctagtgatccacgcgcagttcctcaaagaaggtaattgtccccgggcgcgcggaccggtcctccgcgctctgcccggctcgcggcggctccggcgcccgacccggcttccagcacgttccgctgccgccgcgctcggctgaggctcgtggagcgccactgcgggcccggagcggccggcggcgcgaccctaccaggagcccgaccccccgcggatctcgctgccccgcgcccatcggggctcaccggcagggcgcggggtcggggcgcgctgcgttctcggtgcctctggcgccgccccggatccccagcccaagccgaggctgccgttcccatcccctgccccactgggctcggtggcagcggcgcccgcccgcacgccgccgggccctcggtagatggcaccagcgctccacggtggccggccgggctggggcgggagcggagctgggacccgccagggtgggcgccgggctgggacccgcggacgtcgggaaaccggcctgcgcacctgttccccagggcccaagccgccttccagagacccataggtttgggaagcaggggcttggtcaccggggtgcgcaggtccccgcgccaagttctgcccctgctctcttggtctttgctggactgcagggcagtctgggactattgaggcgcccaggataacggttggaccctcgtggctggagaggccctttgtactgggaagcatcttactgggggttgggggcagggccacacctcccctgatgggcggtcggtcggctccaggcaccccagacacactcctggaaacttcctggtttcagggccaggctccctttgcagggctcccggtgcaccccgggatcagcctggcctgtcatatcagactgggggcaactgaggcgttggcctccccccgggcacccctgctcatggttactagtgctctggcacacaggctgggccagctccgcctggtgctccccttggtccgctgggaaggctgagcaccggagggcgcctgtgtggctggtaaggcgctgggttctcattagttctgggttcctgcagaggaagggcttgcaacattcagctgctttcctgactaattaatgagccgccggaggcctggggaagcaggtaggtgcaggagcccggcccgagaccctgtgacctccacgggcctggtgtccacttccctcccttgcttttggatgtgggcacctagtacagaggagggccaggtctgaagggagagtaggctaccccaggactctgctgcgggcttggcctgccagcccgggcttgcggggacccttccccaggtgggaggcccaacttcttcctgctgccttgctgacccacttcaggagtgggtggttctgccatagggcagtagcacttggggctggggaggccatccttcctgctgaggagtcattgggtccaggcaagcccgcgagggctgtcctctgctggtgtcgcgtgtcaggactgtgggagccacccctggtgcattccaggtacctggcaaaggggtccctgctctgctgggcctgtttgtgttcgcgctgcaagttctctgcctctctggctgatctcgaagtctctgggggattggcttgcggaaagggcgtgtatgtgaaaatttcagtgtttctctgaggtccaggtgcccagctgcatcctgacactctgtgatgaagtgaagttccactgactttgaagctgtgagttagtaacgggagaagctcctggccatgtggccggcctgtgacaagggcttcctttctgcctcgccctgcggcgctgccccagtgcaggtgcctccgggggctctgctgtccccctgaggctccaggtctaaaggactctgttttttggccaagaagaaagagtttctgtctcccagatgggagggtctaggtgtggagcaggcctcgcttagtggagtactttttgtggatttagcccttcacagagatctccatgtttaccttgaagcagacacacgtgtgtcggtgttgtggaagacggcgcagtcataggaaggtgggatgaggatggggtcagctgtacgctgagggcacaggtacctttggaggagcgattgcgggtcccagtgtttgcgcagccctccaggactcctgaagtcctgtctccctgtccggaagcggtggccttcaccaccctgggttgagccctgctgcctgtctgtctggaaggtcaggacttgggcagcctccctgtccttgctgagacggccttttggccccttggcatcaggagccccaggggaggcctgggggaccagcagtgagaggtgcagggaggggggtggccgactctggttcctggctgatgggctcggcctggggccactctcctcccagcagccgctgtccagcaggagggagggaacaaggcaggcgggtggacaattgtgacttgttgtctgggcctgagtgggaaagagctgtttaaatagccattttcatgaatctgttttcttcaggggtgaagaatgggggacccagggagccgtttttccacacttctccttttgtgtggagatagaggccaccccgtggctaatccgtccccccctggccactctggtcttccagtgtttgtggagatgaatagggctgtgaaccgagagagaggcaaattgcggtccataattgcagcctcggtatgtcccagctttgtgagaacaggtcctgcccaccgcaccaggcctggctgggcagccacaggcccaggaagaaagcagggccgcagcgtggggtccggcactggggcctgggcagctgctcttcttgccttgtcatccttaggacacgctgaccctcctctgggaggggagagccgtcctttcttctgaactgcctggtgtgtgcacgtgctgtgtctgcatggggtgtagttaaagtgggggacgagggcgggaatcccaggaccctgatggaagagccggccgcttccttagggtgcagacgacgtgtgtcacggagacgcgagagggaagccagcactttatctccatcatcatgtttggcctccaaatacggagttaaggaaacggcgagaagtataaaaatattttccacctccctcttccaaagactttacaatatttttctggaagtcttgagtcacttggactccagcactccagcacagatgagcaggctttggtgtggaagcttaatgtaaacagaaggataggaaaatacttcaaagaggaaggaatgcggcaagcctgggccacccaggcaggccacagcggcagagaggtttctgggctttggcacccaaagggacatgagaaagccgggaaatcattcggcccgatcctttctgaatgggagggagaacccagtgcctctttcctttaaatgtgggtttgaggttcaactctatctcggtaaatccttttggtggcaggggagtgcattcgacggcttgaacgtgctgtgcaaaagcctcttttgcaggttaatattgagaactttgcgtccagcggccgcggcacggtgtacccgggcctcgattccagaagcgctttcagaaccgctgtggcgtgcctgtctttgagcagctgctcggagggcagactgttgattgagtcaacggattcaacttccattgatttagttagctggctctttcggaaatgaggcgtcctcctgcaaacccatgtggcccgtaacaaggggcatgctcagctccgtgaaggcaattgatggtgtatgaatggttatggctccgcgcagtcatcattaattgatgctgtctttacaagattagcagccaatgcagagtgttcgtctatctgttagatggatcagtttattttttaagaaatggatagagaacttcttaggagacacagcacagttcccggccctaagactccatcaaaaatatttgctgaatgcgtacagccattctgtcccagaggcatagagctagggctgtggatggtccatgatgggttgggtgagggcttggtagatgcccttgaggtttcccagagcagcaaggctgttcttggtgagggctcgaggctgcaccgggctccattctgagtgtctaacggtggaggaggaactcactgcacgcggtgtgtgtggaaggaggagggagttcggcagctctgtgttctcaatgcttacggccagctgtgcctgcacccctgcacccagtcttggcatggggctgccccggccgccaggctccgagcttggagctggctgctcatttctccctgagtctcagactgcgtgtggaggggtgctgggctttgtctaggggccccaggggcttccctagcccacttcctgggtgcattgtttttatggccctgatgaggtgtgcaggcagacagagcgcaggggcatcgcagtgccagccccacatggcaggtgtccctcagcctgcctctccctgaccctccagcagacgctgtttgcaaggccaggtaggtgtgaatggctgctgggaggggtggaaatgaaaaggcgttaaaaataaccaactcttttatcatcatttactatcatttcttgtgtgacacagaatctaaataaaacccacactcaccgtaatgggattctcatctgctgtgtctctgacaactgtaaaagttagaatataaaaggactggaaatggaggtgacttccagacacaaggtggctcatcacagccttgctgggcacaggagtcccagcctcccaggcctccctgcaagggccgagccagtccctgccgagggccaggctggcagtggacggacggggccagctgggggtccctcccactgcacactcgggaggattggattgcggctgatcttgccgccggcatctgtggaaactcatcagtctcccatgttgctgccgtgctgagcacagtgcgagaaagccgtgcggagaatggttttattccccactcggtggtctggaggtgggtggtttttgcccgtctctgggcgcgcggagctgtaggagaggggccactggcgaggccgtgtccgtgctcagtagagtgctggctgcagacacagcccaagagcccctgggcctggagaaggccgggttcgggggcaaccttcttggaagggttcactgctgacatgtnnnnnnnnnnnnnnnnnnnnnnnnnnnnnnnnnnnnnnnnnnnnnnnnnnnnnnnnnnnnnnnnnnnnnnnnnnnnnnnnnnnnnnnnnnnnnnnnnnnnnnnnnnnnnnnnnnnnnnnnnnnnnnnnnnnnnnnnnnnnnnnnnnnnnnnnnnnnnnnnnnnnnnnnnnnnnnnnnnnnnnnnnnnnnnnnnnnnnnnnnnnnnnnnnnnnnnnnnnnnnnnnnnnnnnnnnnnnnnnnnnnnnnnnnnnnnnnnnnnnnnnnnnnnnnnnnnnnnnnnnnnnnnnnnnnnnnnnnnnnnnnnnnnnnnnnnnnnnnnnnnnnnnnnnnnnnnnnnnnnnnnnnnnnnnnnnnnnnnnnnnnnnnnnnnnnnnnnnnnnnnnnnnnnnnnnnnnnnnnnnnnnnnnnnnnnnnnnnnnnnnnnnnnnnnnnnnnnnnnnnnnnnnnnnnnnnnnnnnnnnnnnnnnnnnnnnnnnnnnnnnnnnnnnnnnnnnnnnnnnnnnnnnnnnnnnnnnnnnnnnnnnnnnnnnnnnnnnnnnnnnnnnnnnnnnnnnnnnnnnnnnnnnnnnnnnnnnnnnnnnnnnnnnnnnnnnnnnnnnnnnnnnnnnnnnnnnnnnnnnnnnnnnnnnnnnnnnnnnnnnnnnnnnnnnnnnnnnnnnnnnnnnnnnnnnnnnnnnnnnnnnnnnnnnnnnnnnnnnnnnnnnnnnnnnnnnnnnnnnnnnnnnnnnnnnnnnnnnnnnnnnnnnnnnnnnnnnnnnnnnnnnnnnnnnnnnnnnnnnnnnnnnnnnnnnnnnnnnnnnnnnnnnnnnnnnnnnnnnnnnnnnnnnnnnnnnnnnnnnnnnnnnnnnnnnnnnnnnnnnnnnnnnnnnnnnnnnnnnnnnnnnnnnnnnnnnnnnnnnnnnnnnnnnnnnnnnnnnnnnnnnnnnnnnnnnnnnnnnnnnnnnnnnnnnnnnnnnnnnnnnnnnnnnnnnnnnnnnnnnnnnnnnnnnnnnnnnnnnnnnnnnnnnnnnnnnnnnnnnnnnnnnnnnnnnnnnnnnnnnnnnnnnnnnnnnnnnnnnnnnnnnnnnnnnnnnnnnnnnnnnnnnnnnnnnnnnnnnnnnnnnnnnnnnnnnnnnnnnnnnnnnnnnnnnnnnnnnnnnnnnnnnnnnnnnnnnnnnnnnnnnnnnnnnnnnnnnnnnnnnnnnnnnnnnnnnnnnnnnnnnnnnnnnnnnnnnnnnnnnnnnnnnnnnnnnnnnnnnnnnnnnnnnnnnnnnnnnnnnnnnnnnnnnnnnnnnnnnnnnnnnnnnnnnnnnnnnnnnnnnnnnnnnnnnnnnnnnnnnnnnnnnnnnnnnnnnnnnnnnnnnnnnnnnnnnnnnnnnnnnnnnnnnnnnnnnnnnnnnnnnnnnnnnnnnnnnnnnnnnnnnnnnnnnnnnnnnnnnnnnnnnnnnnnnnnnnnnnnnnnnnnnnnnnnnnnnnnnnnnnnnnnnnnnnnnnnnnnnnnnnnnnnnnnnnnnnnnnnnnnnnnnnnnnnnnnnnnnnnnnnnnnnnnnnnnnnnnnnnnnnnnnnnnnnnnnnnnnnnnnnnnnnnnnnnnnnnnnnnnnnnnnnnnnnnnnnnnnnnnnnnnnnnnnnnnnnnnnnnnnnnnnnnnnnnnnnnnnnnnnnnnnnnnnnnnnnnnnnnnnnnnnnnnnnnnnnnnnnnnnnnnnnnnnnnnnnnnnnnnnnnnnnnnnnnnnnnnnnnnnnnnnnnnnnnnnnnnnnnnnnnnnnnnnnnnnnnnnnnnnnnnnnnnnnnnnnnnnnnnnnnnnnnnnnnnnnnnnnnnnnnnnnnnnnnnnnnnnnnnnnnnnnnnnnnnnnnnnnnnnnnnnnnnnnnnnnnnnnnnnnnnnnnnnnnnnnnnnnnnnnnnnnnnnnnnnnnnnnnnnnnnnnnnnnnnnnnnnnnnnnnnnnnnnnnnnnnnnnnnnnnnnnnnnnnnnnnnnnnnnnnnnnnnnnnnnnnnnnnnnnnnnnnnnnnnnnnnnnnnnnnnnnnnnnnnnnnnnnnnnnnnnnnnnnnnnnnnnnnnnnnnnnnnnnnnnnnnnnnnnnnnnnnnnnnnnnnnnnnnnnnnnnnnnnnnnnnnnnnnnnnnnnnnnnnnnnnnnnnnnnnnnnnnnnnnnnnnnnnnnnnnnnnnnnnnnnnnnnnnnnnnnnnnnnnnnnnnnnnnnnnnnnnnnnnnnnnnnnnnnnnnnnnnnnnnnnnnnnnnnnnnnnnnnnnnnnnnnnnnnnnnnnnnnnnnnnnnnnnnnnnnnnnnnnnnnnnnnnnnnnnnnnnnnnnnnnnnnnnnnnnnnnnnnnnnnnnnnnnnnnnnnnnnnnnnnnnnnnnnnnnnnnnnnnnnnnnnnnnnnnnnnnnnnnnnnnnnnnnnnnnnnnnnnnnnnnnnnnnnnnnnnnnnnnnnnnnnnnnnnnnnnnnnnnnnnnnnnnnnnnnnnnnnnnnnnnnnnnnnnnnnnnnnnnnnnnnnnnnnnnnnnnnnnnnnnnnnnnnnnnnnnnnnnnnnnnnnnnnnnnnnnnnnnnnnnnnnnnnnnnnnnnnnnnnnnnnnnnnnnnnnnnnnnnnnnnnnnnnnnnnnnnnnnnnnnnnnnnnnnnnnnnnnnnnnnnnnnnnnnnnnnnnnnnnnnnnnnnnnnnnnnnnnnnnnnnnnnnnnnnnnnnnnnnnnnnnnnnnnnnnnnnnnnnnnnnnnnnnnnnnnnnnnnnnnnnnnnnnnnnnnnnnnnnnnnnnnnnnnnnnnnnnnnnnnnnnnnnnnnnnnnnnnnnnnnnnnnnnnnnnnnnnnnnnnnnnnnnnnnnnnnnnnnnnnnnnnnnnnnnnnnnnnnnnnnnnnnnnnnnnnnnnnnnnnnnnnnnnnnnnnnnnnnnnnnnnnnnnnnnnnnnnnnnnnnnnnnnnnnnnnnnnnnnnnnnnnnnnnnnnnnnnnnnnnnnnnnnnnnnnnnnnnnnnnnnnnnnnnnnnnnnnnnnnnnnnnnnnnnnnnnnnnnnnnnnnnnnnnnnnnnnnnnnnnnnnnnnnnnnnnnnnnnnnnnnnnnnnnnnnnnnnnnnnnnnnnnnnnnnnnnnnnnnnnnnnnnnnnnnnnnnnnnnnnnnnnnnnnnnnnnnnnnnnnnnnnnnnnnnnnnnnnnnnnnnnnnnnnnnnnnnnnnnnnnnnnnnnnnnnnnnnnnnnnnnnnnnnnnnnnnnnnnnnnnnnnnnnnnnnnnnnnnnnnnnnnnnnnnnnnnnnnnnnnnnnnnnnnnnnnnnnnnnnnnnnnnnnnnnnnnnnnnnnnnnnnnnnnnnnnnnnnnnnnnnnnnnnnnnnnnnnnnnnnnnnnnnnnnnnnnnnnnnnnnnnnnnnnnnnnnnnnnnnnnnnnnnnnnnnnnnnnnnnnnnnnnnnnnnnnnnnnnnnnnnnnnnnnnnnnnnnnnnnnnnnnnnnnnnnnnnnnnnnnnnnnnnnnnnnnnnnnnnnnnnnnnnnnnnnnnnnnnnnnnnnnnnnnnnnnnnnnnnnnnnnnnnnnnnnnnnnnnnnnnnnnnnnnnnnnnnnnnnnnnnnnnnnnnnnnnnnnnnnnnnnnnnnnnnnnnnnnnnnnnnnnnnnnnnnnnnnnnnnnnnnnnnnnnnnnnnnnnnnnnnnnnnnnnnnnnnnnnnnnnnnnnnnnnnnnnnnnnnnnnnnnnnnnnnnnnnnnnnnnnnnnnnnnnnnnnnnnnnnnnnnnnnnnnnnnnnnnnnnnnnnnnnnnnnnnnnnnnnnnnnnnnnnnnnnnnnnnnnnnnnnnnnnnnnnnnnnnnnnnnnnnnnnnnnnnnnnnnnnnnnnnnnnnnnnnnnnnnnnnnnnnnnnnnnnnnnnnnnnnnnnnnnnnnnnnnnnnnnnnnnnnnnnnnnnnnnnnnnnnnnnnnnnnnnnnnnnnnnnnnnnnnnnnnnnnnnnnnnnnnnnnnnnnnnnnnnnnnnnnnnnnnnnnnnnnnnnnnnnnnnnnnnnnnnnnnnnnnnnnnnnnnnnnnnnnnnnnnnnnnnnnnnnnnnnnnnnnnnnnnnnnnnnnnnnnnnnnnnnnnnnnnnnnnnnnnnnnnnnnnnnnnnnnnnnnnnnnnnnnnnnnnnnnnnnnnnnnnnnnnnnnnnnnnnnnnnnnnnnnnnnnnnnnnnnnnnnnnnnnnnnnnnnnnnnnnnnnnnnnnnnnnnnnnnnnnnnnnnnnnnnnnnnnnnnnnnnnnnnnnnnnnnnnnnnnnnnnnnnnnnnnnnnnnnnnnnnnnnnnnnnnnnnnnnnnnnnnnnnnnnnnnnnnnnnnnnnnnnnnnnnnnnnnnnnnnnnnnnnnnnnnnnnnnnnnnnnnnnnnnnnnnnnnnnnnnnnnnnnnnnnnnnnnnnnnnnnnnnnnnnnnnnnnnnnnnnnnnnnnnnnnnnnnnnnnnnnnnnnnnnnnnnnnnnnnnnnnnnnnnnnnnnnnnnnnnnnnnnnnnnnnnnnnnnnnnnnnnnnnnnnnnnnnnnnnnnnnnnnnnnnnnnnnnnnnnnnnnnnnnnnnnnnnnnnnnnnnnnnnnnnnnnnnnnnnnnnnnnnnnnnnnnnnnnnnnnnnnnnnnnnnnnnnnnnnnnnnnnnnnnnnnnnnnnnnnnnnnnnnnnnnnnnnnnnnnnnnnnnnnnnnnnnnnnnnnnnnnnnnnnnnnnnnnnnnnnnnnnnnnnnnnnnnnnnnnnnnnnnnnnnnnnnnnnnnnnnnnnnnnnnnnnnnnnnnnnnnnnnnnnnnnnnnnnnnnnnnnnnnnnnnnnnnnnnnnnnnnnnnnnnnnnnnnnnnnnnnnnnnnnnnnnnnnnnnnnnnnnnnnnnnnnnnnnnnnnnnnnnnnnnnnnnnnnnnnnnnnnnnnnnnnnnnnnnnnnnnnnnnnnnnnnnnnnnnnnnnnnnnnnnnnnnnnnnnnnnnnnnnnnnnnnnnnnnnnnnnnnnnnnnnnnnnnnnnnnnnnnnnnnnnnnnnnnnnnnnnnnnnnnnnnnnnnnnnnnnnnnnnnnnnnnnnnnnnnnnnnnnnnnnnnnnnnnnnnnnnnnnnnnnnnnnnnnnnnnnnnnnnnnnnnnnnnnnnnnnnnnnnnnnnnnnnnnnnnnnnnnnnnnnnnnnnnnnnnnnnnnnnnnnnnnnnnnnnnnnnnnnnnnnnnnnnnnnnnnnnnnnnnnnnnnnnnnnnnnnnnnnnnnnnnnnnnnnnnnnnnnnnnnnnnnnnnnnnnnnnnnnnnnnnnnnnnnnnnnnnnnnnnnnnnnnnnnnnnnnnnnnnnnnnnnnnnnnnnnnnnnnnnnnnnnnnnnnnnnnnnnnnnnnnnnnnnnnnnnnnnnnnnnnnnnnnnnnnnnnnnnnnnnnnnnnnnnnnnnnnnnnnnnnnnnnnnnnnnnnnnnnnnnnnnnnnnnnnnnnnnnnnnnnnnnnnnnnnnnnnnnnnnnnnnnnnnnnnnnnnnnnnnnnnnnnnnnnnnnnnnnnnnnnnnnnnnnnnnnnnnnnnnnnnnnnnnnnnnnnnnnnnnnnnnnnnnnnnnnnnnnnnnnnnnnnnnnnnnnnnnnnnnnnnnnnnnnnnnnnnnnnnnnnnnnnnnnnnnnnnnnnnnnnnnnnnnnnnnnnnnnnnnnnnnnnnnnnnnnnnnnnnnnnnnnnnnnnnnnnnnnnnnnnnnnnnnnnnnnnnnnnnnnnnnnnnnnnnnnnnnnnnnnnnnnnnnnnnnnnnnnnnnnnnnnnnnnnnnnnnnnnnnnnnnnnnnnnnnnnnnnnnnnnnnnnnnnnnnnnnnnnnnnnnnnnnnnnnnnnnnnnnnnnnnnnnnnnnnnnnnnnnnnnnnnnnnnnnnnnnnnnnnnnnnnnnnnnnnnnnnnnnnnnnnnnnnnnnnnnnnnnnnnnnnnnnnnnnnnnnnnnnnnnnnnnnnnnnnnnnnnnnnnnnnnnnnnnnnnnnnnnnnnnnnnnnnnnnnnnnnnnnnnnnnnnnnnnnnnnnnnnnnnnnnnnnnnnnnnnnnnnnnnnnnnnnnnnnnnnnnnnnnnnnnnnnnnnnnnnnnnnnnnnnnnnnnnnnnnnnnnnnnnnnnnnnnnnnnnnnnnnnnnnnnnnnnnnnnnnnnnnnnnnnnnnnnnnnnnnnnnnnnnnnnnnnnnnnnnnnnnnnnnnnnnnnnnnnnnnnnnnnnnnnnnnnnnnnnnnnnnnnnnnnnnnnnnnnnnnnnnnnnnnnnnnnnnnnnnnnnnnnnnnnnnnnnnnnnnnnnnnnnnnnnnnnnnnnnnnnnnnnnnnnnnnnnnnnnnnnnnnnnnnnnnnnnnnnnnnnnnnnnnnnnnnnnnnnnnnnnnnnnnnnnnnnnnnnnnnnnnnnnnnnnnnnnnnnnnnnnnnnnnnnnnnnnnnnnnnnnnnnnnnnnnnnnnnnnnnnnnnnnnnnnnnnnnnnnnnnnnnnnnnnnnnnnnnnnnnnnnnnnnnnnnnnnnnnnnnnnnnnnnnnnnnnnnnnnnnnnnnnnnnnnnnnnnnnnnnnnnnnnnnnnnnnnnnnnnnnnnnnnnnnnnnnnnnnnnnnnnnnnnnnnnnnnnnnnnnnnnnnnnnnnnnnnnnnnnnnnnnnnnnnnnnnnnnnnnnnnnnnnnnnnnnnnnnnnnnnnnnnnnnnnnnnnnnnnnnnnnnnnnnnnnnnnnnnnnnnnnnnnnnnnnnnnnnnnnnnnnnnnnnnnnnnnnnnnnnnnnnnnnnnnnnnnnnnnnnnnnnnnnnnnnnnnnnnnnnnnnnnnnnnnnnnnnnnnnnnnnnnnnnnnnnnnnnnnnnnnnnnnnnnnnnnnnnnnnnnnnnnnnnnnnnnnnnnnnnnnnnnnnnnnnnnnnnnnnnnnnnnnnnnnnnnnnnnnnnnnnnnnnnnnnnnnnnnnnnnnnnnnnnnnnnnnnnnnnnnnnnnnnnnnnnnnnnnnnnnnnnnnnnnnnnnnnnnnnnnnnnnnnnnnnnnnnnnnnnnnnnnnnnnnnnnnnnnnnnnnnnnnnnnnnnnnnnnnnnnnnnnnnnnnnnnnnnnnnnnnnnnnnnnnnnnnnnnnnnnnnnnnnnnnnnnnnnnnnnnnnnnnnnnnnnnnnnnnnnnnnnnnnnnnnnnnnnnnnnnnnnnnnnnnnnnnnnnnnnnnnnnnnnnnnnnnnnnnnnnnnnnnnnnnnnnnnnnnnnnnnnnnnnnnnnnnnnnnnnnnnnnnnnnnnnnnnnnnnnnnnnnnnnnnnnnnnnnnnnnnnnnnnnnnnnnnnnnnnnnnnnnnnnnnnnnnnnnnnnnnnnnnnnnnnnnnnnnnnnnnnnnnnnnnnnnnnnnnnnnnnnnnnnnnnnnnnnnnnnnnnnnnnnnnnnnnnnnnnnnnnnnnnnnnnnnnnnnnnnnnnnnnnnnnnnnnnnnnnnnnnnnnnnnnnnnnnnnnnnnnnnnnnnnnnnnnnnnnnnnnnnnnnnnnnnnnnnnnnnnnnnnnnnnnnnnnnnnnnnnnnnnnnnnnnnnnnnnnnnnnnnnnnnnnnnnnnnnnnnnnnnnnnnnnnnnnnnnnnnnnnnnnnnnnnnnnnnnnnnnnnnnnnnnnnnnnnnnnnnnnnnnnnnnnnnnnnnnnnnnnnnnnnnnnnnnnnnnnnnnnnnnnnnnnnnnnnnnnnnnnnnnnnnnnnnnnnnnnnnnnnnnnnnnnnnnnnnnnnnnnnnnnnnnnnnnnnnnnnnnnnnnnnnnnnnnnnnnnnnnnnnnnnnnnnnnnnnnnnnnnnnnnnnnnnnnnnnnnnnnnnnnnnnnnnnnnnnnnnnnnnnnnnnnnnnnnnnnnnnnnnnnnnnnnnnnnnnnnnnnnnnnnnnnnnnnnnnnnnnnnnnnnnnnnnnnnnnnnnnnnnnnnnnnnnnnnnnnnnnnnnnnnnnnnnnnnnnnnnnnnnnnnnnnnnnnnnnnnnnnnnnnnnnnnnnnnnnnnnnnnnnnnnnnnnnnnnnnnnnnnnnnnnnnnnnnnnnnnnnnnnnnnnnnnnnnnnnnnnnnnnnnnnnnnnnnnnnnnnnnnnnnnnnnnnnnnnnnnnnnnnnnnnnnnnnnnnnnnnnnnnnnnnnnnnnnnnnnnnnnnnnnnnnnnnnnnnnnnnnnnnnnnnnnnnnnnnnnnnnnnnnnnnnnnnnnnnnnnnnnnnnnnnnnnnnnnnnnnnnnnnnnnnnnnnnnnnnnnnnnnnnnnnnnnnnnnnnnnnnnnnnnnnnnnnnnnnnnnnnnnnnnnnnnnnnnnnnnnnnnnnnnnnnnnnnnnnnnnnnnnnnnnnnnnnnnnnnnnnnnnnnnnnnnnnnnnnnnnnnnnnnnnnnnnnnnnnnnnnnnnnnnnnnnnnnnnnnnnnnnnnnnnnnnnnnnnnnnnnnnnnnnnnnnnnnnnnnnnnnnnnnnnnnnnnnnnnnnnnnnnnnnnnnnnnnnnnnnnnnnnnnnnnnnnnnnnnnnnnnnnnnnnnnnnnnnnnnnnnnnnnnnnnnnnnnnnnnnnnnnnnnnnnnnnnnnnnnnnnnnnnnnnnnnnnnnnnnnnnnnnnnnnnnnnnnnnnnnnnnnnnnnnnnnnnnnnnnnnnnnnnnnnnnnnnnnnnnnnnnnnnnnnnnnnnnnnnnnnnnnnnnnnnnnnnnnnnnnnnnnnnnnnnnnnnnnnnnnnnnnnnnnnnnnnnnnnnnnnnnnnnnnnnnnnnnnnnnnnnnnnnnnnnnnnnnnnnnnnnnnnnnnnnnnnnnnnnnnnnnnnnnnnnnnnnnnnnnnnnnnnnnnnnnnnnnnnnnnnnnnnnnnnnnnnnnnnnnnnnnnnnnnnnnnnnnnnnnnnnnnnnnnnnnnnnnnnnnnnnnnnnnnnnnnnnnnnnnnnnnnnnnnnnnnnnnnnnnnnnnnnnnnnnnnnnnnnnnnnnnnnnnnnnnnnnnnnnnnnnnnnnnnnnnnnnnnnnnnnnnnnnnnnnnnnnnnnnnnnnnnnnnnnnnnnnnnnnnnnnnnnnnnnnnnnnnnnnnnnnnnnnnnnnnnnnnnnnnnnnnnnnnnnnnnnnnnnnnnnnnnnnnnnnnnnnnnnnnnnnnnnnnnnnnnnnnnnnnnnnnnnnnnnnnnnnnnnnnnnnnnnnnnnnnnnnnnnnnnnnnnnnnnnnnnnnnnnnnnnnnnnnnnnnnnnnnnnnnnnnnnnnnnnnnnnnnnnnnnnnnnnnnnnnnnnnnnnnnnnnnnnnnnnnnnnnnnnnnnnnnnnnnnnnnnnnnnnnnnnnnnnnnnnnnnnnnnnnnnnnnnnnnnnnnnnnnnnnnnnnnnnnnnnnnnnnnnnnnnnnnnnnnnnnnnnnnnnnnnnnnnnnnnnnnnnnnnnnnnnnnnnnnnnnnnnnnnnnnnnnnnnnnnnnnnnnnnnnnnnnnnnnnnnnnnnnnnnnnnnnnnnnnnnnnnnnnnnnnnnnnnnnnnnnnnnnnnnnnnnnnnnnnnnnnnnnnnnnnnnnnnnnnnnnnnnnnnnnnnnnnnnnnnnnnnnnnnnnnnnnnnnnnnnnnnnnnnnnnnnnnnnnnnnnnnnnnnnnnnnnnnnnnnnnnnnnnnnnnnnnnnnnnnnnnnnnnnnnnnnnnnnnnnnnnnnnnnnnnnnnnnnnnnnnnnnnnnnnnnnnnnnnnnnnnnnnnnnnnnnnnnnnnnnnnnnnnnnnnnnnnnnnnnnnnnnnnnnnnnnnnnnnnnnnnnnnnnnnnnnnnnnnnnnnnnnnnnnnnnnnnnnnnnnnnnnnnnnnnnnnnnnnnnnnnnnnnnnnnnnnnnnnnnnnnnnnnnnnnnnnnnnnnnnnnnnnnnnnnnnnnnnnnnnnnnnnnnnnnnnnnnnnnnnnnnnnnnnnnnnnnnnnnnnnnnnnnnnnnnnnnnnnnnnnnnnnnnnnnnnnnnnnnnnnnnnnnnnnnnnnnnnnnnnnnnnnnnnnnnnnnnnnnnnnnnnnnnnnnnnnnnnnnnnnnnnnnnnnnnnnnnnnnnnnnnnnnnnnnnnnnnnnnnnnnnnnnnnnnnnnnnnnnnnnnnnnnnnnnnnnnnnnnnnnnnnnnnnnnnnnnnnnnnnnnnnnnnnnnnnnnnnnnnnnnnnnnnnnnnnnnnnnnnnnnnnnnnnnnnnnnnnnnnnnnnnnnnnnnnnnnnnnnnnnnnnnnnnnnnnnnnnnnnnnnnnnnnnnnnnnnnnnnnnnnnnnnnnnnnnnnnnnnnnnnnnnnngctgtgtctctgacaactgtaaaagttagaatataaaaggactggaaatggaggtgacttccagacacaaggtggctcatcacagccttgctgggcacaggagtcccagcctcccaggcctccctgcaagggccgagccagtccctgccgagggccaggctggcagtggacggacggggccagctgggggtccctcccactgcacactcgggaggattggattgcggctgatcttgccgccggcatctgtggaaactcatcagtctcccatgttgctgccgtgctgagcacagtgcgagaaagccgtgcggagaatggttttattccccactcggtggtctggaggtgggtggtttttgcccgtctctgggcgcgcggagctgtaggagaggggccactggcgaggccgtgtccgtgctcagtagagtgctggctgcagacacagcccaagagcccctgggcctggagaaggccgggttcgggggcaaccttcttggaagggttcactgctgacatgttcatgtgtgtgcatatgtgtgtgtgtacacgtgcctgcttatgcataactaaatgctcataggtgttcatatcattgtgtgtgatcttcttaaacataaactacaggatcatgcattataaacctcatttaaaatacagccccttcgttagggagcagcgcacgcaggcagtggtgttcctgtgttcctggagaggggagggaggcatcctcaccttatttacgcagagacacatagttttgtggctgcactgcgatctgagcagacagaaaacatggagcgaagcacgcagctgtgggtctgcgtggaacatgggactgttcgctcacacacgcacccagtgagtggacagggctcctttgagaccaaccatgggacccggtagcctttgtactgtgggagccctgacctgcctgtcggggcaggcggccctttcctcgttctccttttacctgggctctgtgtgtgagcccacctctcccagagacacgcactgcggtgccccccaacagagacacaccacacactacacgatgcacacacccacaccacacaaaatacacaacgcataccatacaccccacatactgcacacactacacaccatatgctgcacaccacatacacaccccacacgcaaaatacaccacataccacacacaaaatacaccacacacaaaatacaccacgtaccacacacaaaatacaccacataccacacacaaaatacaccacacacaaaatacaccacataccacacacaaaatacaccacataccacacacaaaatacaccacacacaaaatacaccacacaccacacacaaaatacactacacacaaaatacaccacacacaaaatacaccacataccacacacaaaatacaccacacacaaaatacgccacataccacacacaaaatacaccacacgccacacacaaaatacaccacacaccacacacaaaatataccacacacaccacacacaaaatacaccacacacgaaatacaccacacaccacacacaaaatacaccacacactacactcaaaatacaccacacacaaaatacagtacacaccacacacaaaaaaatacaccacatacaccatacaaactagataccacacaccactcacaaaaaacatcacactgctcataccacacagcacacaccgcagacacacaatacaccacacagataccacacacaacaaaatacaccacacacactagacatcacacacacactatgcattatgcacacacaccacacacaccacaaacatacacaacgtatacacagacacagaatataccacacacaacacacacacataacatacaccacatacgcataccaaatacgcataccacacacacaccacacataccctgtgaaggccacgcacacacaaagcgcagaaacacacccccacacaaacacatgccaagacacacacacacaaacatacaccacatgcatgttatacacacacagccaaacatcataaacacacgttacacccatcacaccgcacacacacgataccccaaacaccacacagtctgcagctcaccccgtgggcccagcctggcgttctggaggaagggagaggagggtggaccccagcttcggcctctgcccctgcagccttgtccccatcctcacccggaccctgaccctggccctcgctggctgggcctctgcagaggcttcctgaggaggaaggtactgccctgaccttcacagctggggcaagtgtggcccagtgaggtcaagggagggtgcagatcccagaggatagcaggacaggtgcagccacgtggctctcttctctctatgaccccaggcagaggtggcgtgggtgttgcctgggcattgcacacgcacctcctgctgcaggctgcatcacccgtcttgcaggtcttgtgctcctcccaagggtcacacccacctatgcaaataacctttgggacgaggaagccccacctgcagcatgataccaggctagtggctgggcttctgggaccctcggtctcctctttgcaggaagggaatgataaaaggagtggaagcccgaggacttccacgggggtcccctgacagatggccccagcagtgaccttgtgcaaaacccaggagccacccctgccaagtgctgggcgtgtctgtggagcagatgaggccacaggcactggccacaggactgcgctgtctggagagggattcgcacacatttgcaggggtgcagggctggtgttctcaggattttgcctggcttctctggatccggaggtcctgggaaggtggcttggaccctggtgggcggagtctttgaagtgcagtctggaatcttccatgcacagttgggcgacctggacagtgcccactgtgttctctagagagttcctcaaggatgcagcccctttgtccagacactgttgcaggaggcagggagggaggcctgccccatgtcccctggatggcaggatgggctcccaccttgtgtctggctgggctgtagtgtgcggggcagccaaaaggcaccctccgggtaatcaaggcctaccccacatggggactctggtgagaaccgggcctccaccgaccccctgtccagggtgcaggagccaggcccgtgctgtcagctgtgtctgtttgtctgtggtttccctgtggcttcatggcacatgcaggtctctcttcatgctttgggtgtggaagccgtcgtcagctgagagtgttctgtgggtgggtagctctccttcctcctgaatttggggtgaccttctgtgtggaggcccatgacggtttcccatgcattccggggctctgggatgctgtgggcacgagttctggaggggtctgcacacctaggttcatctcacgggcctcggggtgggcagagggtcctggactgcagggacttgcccttctttgcagctttgtgctttggtggtaaagaaagggctgtgtcctcagccacactgggagctgctgcccttgcgtggaacaggagcagctgtttgtgggcagtccaggtgtgggctgcaggcgggtcggggtgggctgcaggcaggcatttaaggaagtcacagctccaggcaccaaggaggcagtggctgctggccctgtcctttgctgcatttctgtggactcctagcccagggaatggagccctggagggtcccagggtagccggtgtcacctgaagtgtcccagggacacctggtcctctggctgatggggccgccctgtggggtaggccaggccctggctctctggccctcagggcagggtgcgggttccccacttccccggccctcacacacacccttccagccacccgcgtgagcatgctccaaacacggccttctgcccttgccttttcttctccttttgcgttttaaaaatcaaatcagcggttcggaaggcctggagcttggaggactcacgcagaggcggccttctgcctgccctcaggggctcctgaacttcccagaagcagccctccctcccaggctgaactttctgtctcagtccccgcactttcccagctaggcgggctccttgttcctgcccattttactccagaagggaagcaggcaggcccgggttatcctgcaggtgccaggagcccccttggccaagctccatctgtgcataatgggggctccagtggtttggggggttggtccatgggagaactggatgttcaccaggggtcagcattggccttgaagtgtggagaagggtcatcttggcagaggtggcaaggtggtgagcccctggggctgagcacaggtgcgtctggtgagaggggcctggccatgaccgcagtgactgctcttcactgtcacctcctttgctcctcaggccacctgcgcagagggtgtgatccttgcatgactttgccattgaggaaatgcaagggcagaaagtgcagtctcggcggccgcccgagaaccaggtgccctctctcccgactttgctccctggatggggctgcactgcccgtcctgaaaggctctgctgaggcattgggggaaggaaggcattgctcgcagtgggaggggtcctgcagagggtcccaggcagggtgggtgctaccttcaaagttgacagtgggactcctcaccccgtcccctgtgttggactcgaagtgggtccccatggattgagtctggtggctgctgggtatcggggctggtttctgggctatggtctcttgctgtgacaacggggacctgcggggatgggggcacgattcggtgccacctccctgcctctgtggcctcccggttggggcagggcagggcctggaggttctagaaggcccttggttcaggtgagcacagtgccttcggggatgctcctggcagaagactcaggaatctgtgggaagacccgtccccgagaccattccaactggaccgcatggagccaacctggccccccgtgatcttccctgggtatatttagaagaggtcatggagcctttacaatacacactcttcaaagtcagcctctgcctcagagaaggtggattttattagccaattaccttccttctcctccgattacagaagcagccaagcaggccttctgattcgcttcaccgatagaagaatgcagaccttgcttataaataactgtgctttgcagaaccagaaaatccatcttcagaccctcctgtccccagggaatgcctgcacagtgacaactccctgctcctgcccgctggttgccttggggacaaccttgatagacatgctggcctcagtttggcatgcacgtattgagtacctgctgtatgccggacatgggctgcttgctggcggaaggtggccagggggtgactggctgggggtttggtaggtctcatgggatcatttatgtgaaaaggcagagtgaggacttgagtctctgcacctgtgagaaatgtacacctgtggggtcagttggaggtccccaaagacagagccacctggaaaccagggtcggttggaggtccccaaagacagagccacctggaaacccagggtcggttggaggtccccaaagagccacctggaaacccagggttggttggaggtccccaaagacagagccacctggaaacccagggtcggttggaggtccccaaagacagagccacctggaaacccagggtgctctctcatttggaaaaagggcctttgcagatgtagttaaggtcaggttctcaagatgatggtgccttaggttaggatgcacccaaactccaaaggcaagtccttagaagagaagagaagcaaacagagagggggcctcgtgaagatagcgcagggtctggagtgatgtggccacacgctgaggagcacccgcagccatcaggagctggaagaggcaggaaggatcctccctggagcttttagaggaagcgcaggcccaagacaccttgatttccaacttctgccctccagaactgtgagagcagaaactcctgtttttaagccacgagtttgtggtggtttgttacagcggccagaggaaccggatatagcaggccaagccgaagatcttgtcacaggggattgcagccgacgtgtgtgtgtgtgtgtgtgtgtgtgtcacgcgcacatgcacgcgtgcttgggggtctctggtcagcgtggctggcggatggggcctgggtctgattcgggtccaccttgtctcaaggaggacctggaggggacagatgctccgtcagcatgaaggggaagatccggattcccatcccggaggtggaatgccacggaggcgagggcccttgagttgggggttaaagaagaagctggttttcccgaggagatcggggttggggtggccagcccagaaattcttaatgctcctccttccataaatccagcattgcccagagcaagggcacgcaccgctgttggcctgcaagatggttttatgcggatgcggacgggcatttgttattttaatagctgtgtatcagcttttatggctaccttctatttatggcaaaggcgctggctttccattcacgggctgatgggaggtttctttttagcagtgaggtgatacatgggtatggtgcaaccctggcggattcacaggtggcccaagcccgggagacactgttgtggcttctcgagcatctcctaaacacccagtgtagagaaggggctgagcctgggccgagctgaccacgaggggctgccatacacagacccaggactgtgactctgagagcccaccggctggtgtacctttgaaagtgacattttcattttttttttaatccaaaagaaaattgtggaaaagatcaatgtttgtgcccagcctcctccaggccatttcctattccagttggaatccgttgtgaccagcttcacagttacctggtatgttattaaaaatgtgtctggtgtttagtctttttgttcatgatttgttctttttttttttttctttttgagatggagtttcactctgtcatccaggctggagtgcaaaggcatgatcttggctcactgcaacctccgcctcccaggttcaagcagttctcccgcctcagcctcctgagtagctgggattacaggcgcccatcaccacgcccagctaatttttgtatttttagtagagatggggtttcgccatgttggccgggttggtcttgaactcctgacctcaggtgatccgcccgcctcggcctcccaaagtcatgatttgttcttaatgcactaatttatcttagttgaaacacacatttctcttttctctgaagttggtggcttggccttgacagcaacctgaagagttctgtgtattgagttggtttcttcttgtctctgggatgggctgtgagccaggaagaggagaagcttcccggttccttagtgaatcttctagaagggatcgtggttgcccttgggtggaaactgccctcagagccacaggcaggagtgggtgttcccgtcgcaagccacccctctgggtcctgcccgctctcctcccacccccgtgcgtctgacccccagggcttgcgatgcctcagttgcctgcagccatggccttgccctggatggagagcacagacagaggcagctgggagtttctgggagtttctgaggcctcgcattggacagagtcatcctgctggcgcagggagtgggcactgaccgggggcggccctgagggctccagatgacaggagagagcctgctccagggcagcggggtcacagggtgatggggtgacccagagcagctggaaggtgaatgccggagcctgggcctgaccctgagctggcctgagggaggggccatggccagctgagccctgaactgatgtgggcagcatgttccccagtcaggagatggtggcgtggcagagggaggaggcactgggctcgcggaagcccacgtagctagggtccagcccctcccgacctcccccacggagtctccctctcagggcagccagcatcccgggcgcctgggcccggtgtctgtctccccaggcaggtgcctgggatgcagtgccccagcctcacggccctgagcgcccttcagccactgaagtgtgatggccgggggtgatgcccacggccccggggcacctcccctccttagcaggtctctgcctggacggcaggaggcggggggtcccttgcaggtcccgaggctggtggggccagccttggtcgggccccaccctgaggcctgggcctgagccacgggtggagttgctgttgtggtcagtgacccacccatggtgctgaccctgtgccagtgctgtgcccagggcactgtgccagcctcctttctttctatgggctgctggtctgtccccaacactgtacagtggccctggagtgaggctggcagagcctgcagccccccagggttgagccttggctgtccccttgctggtgtgtgacctggtggctgtgttccccatgccctgtctgctgccctgcacgcaggataagcatcagaggaccttggaggctgtggtgcaggtgaagtgggagccactacaggcaggggcttgggacgttgcactcagctctctgctgtccttgcctcatgcccagccctgggtccaggtctcttccccctcctgctgtcccagcctctgatttgggctgaagaaccacgaaacgggtgctccgggcactgtcgtttctcttttcatctctggggcgcactcctctgcgctctgcctgtctggccggtatctgctgcctccctccctccctccctccctcactccctcctctcagtgactaactcggtcctgggaaggttggttcttgcctgccctcctgctcagaggcctgagccagtctagagcaaggaagccctgtgctcccgagaaaccgagcagaaacacagttttctggggcatttgtaggagatgcaggtgcggggagcattcctggagcttccctggaatccctcctgtgtgttccgtggtggtcccaggggtctctcagaaagacacctacctggggacagagggcttggctggctggatcagggtctttgtggtggacctgtctgtggggtttggtcctgagtcctggaccagggcctcttcagagctagctgagtggggcgggggggtctgtaggagggaggcgtccctgcagccgtcggaactgagatgtcctccgggaatcccgacaggagccgcagcagacgcgggatgggaggtgcccaaagtcacgtccgcgaacagtgtcacctgggagacgccatcactctttcccagcttgacgtcctgaggccgaggccagcccaggaccccacctgtgtccccagcagcctggtgtataaagcggagcattggagctgggagaggagggctgcagaggctgagatgcagctggtcgggcccagcccctccattttgcagatggggaaatagaggcacggggcaggggagggactggcccaaggccatatgggtctcaaattactgatggtgaccgatgtgaaggggacgtgtcttttcaggcagggagactgctgtgggcctggcaccaggtagaggttctgagctggctgtctgggctcggggggtgtctcagggcacaggactgatgggggtggctggggtcggggattagggactgctgggttgaggagggctagtgccaagttgagagaaacatccccttggcccagcaccccaggtggctgtgttggtaccaattgcttaaaattgcaccttcattttgcagctcctgttgggcgccttctcaccgcgcgctcgggtgcagtgaactctgggagccgtcgcagcccagggagtccccaaggaaggccagctggggccatcccttagcacggcctccccaggcctccacttcccgatctgtgaaatgggacagtaagagctcccccgaggccaagtcctgccgccctcctgccctgctgtggaccccagtgcaactgtgagcatccgaggtggtgaaggggacctcacagcacacagagtgcacggcgctgcagcccaaggagacctcatcagtgtgtcggctctcattttcgttatttttcctattattttctctatcttctgaagtccttatgtaaggaattatggtttccggggagacccattgtgataaatgccagaaaacaaaagcttttttccagggcgctgaggcctgtggatcctcccaggccctggtcatgctcctgtgcccacagagtggccctgtgtttgcactctttctctggggatgcacaggggcggtgagagggaagcaggcggctgctcttggccagtggaactgcccggcgttggggtgcaggcgagacccagcgaggctcgaggactgcagactatgcagcagatcctggcaggctttggctgtctgacccactcggatgggcgaggagagaaatggggggaccagtgggacgttctggggtgcacgcatgtaggggaagctgttagtgcattctgagcacccggtgcacataggttgacaagctccgaggcacacacacacgagtgtgcacaggcagcctctgagggctacgcccacggggatgggaagatggggctgggatagggagggctgggccccaccctctcagggacatagcctgaaaacagggcagtgcaggactctgatgcctcacacagtcctcagagcagccccggtgtgatgatccccataggctcatgctcccgtcggctgccagccatctctgcatcctgcctttgagcctctgcacagccctcatctgtgggtgtccagagccttctgcagaggccagactgccactcagtggtccccgcatttctgttgtctaccaggagcactgtctgtatttttaagaggtggacagatagcagtgcagacagacggatgggcgtaaggacgggcgccctgccaggatgctccgctgtctctcagccccggaggcaagtgcagctggagctgaatttgcctcctgagcacatttttttttttttttttggtgctcagagtagcccttgggactgccccatgtccccagcacaccttcggctgagcagggtgcctgtacccctgagggaatttgcagatcagctctccctgtccacacggggcacatagagccccagccagggtggttctagttctagaaaggagtgctgccttgagcctgtgaccgggtggtggtggtgagcctgaatttggctttggaattaggcccctgagtgtggccctgctgtgctcgtacccctgagtttgcagcctgcatgccccaattggggcccgccagtggcaaagcagttcccttcccacctactcaggggatgtgcagccatggagcctgggaggaggcaccaccaccacccgtgatcagctccaacctcaaacttcagggagacatggttccccaaatggttgccccttccaggttctcctcttcccggcgcgtcagtgggggtgtggttgtgccccaaggctccaacaggtgttagggggagtggaggcagctgacagagcaggggctggcgttatcctgtggaagaggtcggggaagtggccatgtgtgttagatccgcaagtgctgccggtagctatgaggagctccctgatcagaagagcccaggtctcgtctctggattgaagccactggggctctgtggaggccaccaagagaccctgcatccgttccgtggacaagccacaataagggagatgtcacacatctccagacgtgctgccacacgcagtgcagcgggcaacctgcccatcaggctgcaggggacggggtgcctctggggactggctcccagcagccctggaggtcctcttgcactgtttaattcgtgtctacacagggccacgctcacatcagcgtgctctaatcctttaagaactgagattgtctccaactacagctgagttacaagctgcataaattaaaacttctcatacatggtatcttgtagccttattaagtggcaagattatgcaaaacaatctgtaagtatgataatacaactttcgccatggtttgtaacaggacatttgttatctctcattctgctctaattaagctccattctggaggaattagtggtattactgtttaaatcttaacttttgtattaagaaagcatgttccaaagcttttgaaatgcatcttgaaagcagtgcctgaattaacaggtttaacaaggagcgtaggaatttcaaagctcggctaatctgtagaaattatggtagctgtgccagatttatttttcatttaattaaaacaaaaagttgttttgctgaaagttacccagataaagttgtttcagcaaaggcaagaagcagtgttgaagagacgcggccttctggggcccaggactgagcgttggtttctgttgaccacgctgtgcctccacggcccgtgtgtctgggtctgggttctgggccctgggctctgggatggcatcagggctaagggacaccagccccctcccggtgtggtcctcactgattaacgctcctcagcgcagcacattctcaatattctgtcaaggggcaaggttgagagtgtggttttattactgtttgtgaaaatcacaggctttatgttttagggcagttgtagggttacagaaaaatggagcagatggcagtttccatctagcctctctcctgcccctcccatccccacagggtcccgtgataacagctggcatgagggaggcgcgtgagtgacaagtgaggctcgacattgacacgctgttattaaccgaggcccatggttcacaccagcgctcactcttggcatggagcattctgtgggtttggacccacgtatcgtgacgtgcgtccaccgagatcgtagcatacagaggggcgccactgccctagggctcctctgtgctggatgccatcattttcattttattttattttgtttttgagacagggtctccttctgtcacccaagctggagtgcagtggtgcgacctcagctcactgcagccttcacctcccagctccactgatcctctcgctcaagcctcctgagtagctgggatcacaggtgtgcacccccacgcttgactagtttttgtattttgtagagatgaaggtctcgctgcgatgccctagctggtctcgaactcctaggctctggcgatcctcccgtcttggcctccccaaatgctgggattccaggtgtgagtcaccacagccggccagttttttaaagaacaccaaaaaatagcattcatgtaaagttatttgcctcgtgaaccaccattgatggtcccagaggggagatagtcagggccttccctgagcgtgtccccagagtgtccccaggaacacctgctgcccccttcaccacgccaccatggcccccatcacccgggcctcagtttccctgctgttcccctctctaccggctggctcatatgcagagtgtcctgggagccacctgccaccctcttcaccacgccacctggcccgcatcacctgggcctcagtttccctgctgttcccctctggctggctcacatgcagagtgtcctgggagccacctgccaccctcttcaccacgccaccatggcctgcatcacctgggcctcagtttccctgccggtcccctctggctggttcatatgcagagtgtcccaggagctacctgcagcccccttcaccacgccaccatggcccgcatcacctgggcctcagtttccctgccgttcccctctggctggctcacttgtgaggggaaccccaccacatgcggttatatctgcacctcagcttccggttcttggctgagtctgacttcatcatgcccttcattgtcatcctttcagaaaactcttactggcacttctcagccgactggctccagacacacgtggtaggcacaggctgagctgctgctctctgggtgtggagaccctggtgaggctggaaagtgccccagaagggggagttaagggatggagaagggacagtcgggttggaccaacgcacgggccgattatgacttgagcgtgacgctgatggcatgaacacaggagtcccggccctccatggtggggggagtgtacctgtcagggttcttcagagaacggaaccaatgggacttcgagagagcgagagggagcgaggtttccctttttaaaaataagcttctgcagtttcagaggctgtcagtatgacatctgcagggaagagggcaggctggagacgcagcgagaggtgcagctggcgtcgtgaggcctccgctggagaattcttttcttgcttgaggaaggtccatctttgtccattgaggccttcacctgcttggatagggcccacccacagtatggaaggccatctgctttattcaaaatcaccgattcaggcgttactctcatccaaaacactccttcacagaaaaatccagaatcatttgaccaaacctgtgggcactgtggctccgtcaagttgacacatgttacccatcacttggaggttatttccagggggcagtggtgaggggctggcgctgtgatcgtgcttagtgtttatggcgtggggctgagggagaccacacaggaagggacgtctcctcctggtgccacctcctgggagagtggccatttcgtgggcccagcagtggctgcatcttaggcagttgtgtgagatgacctccatgtaggctgccatggtgtcaccggctgacctggtttcactcacacttctgacaccaaatgtgtcagtttttcacaccaacaagttctccaactttccagacaccaaatgaatatctggccatttaattaaattgtcctccaatttaattcggttctcagactactccccagagttagctgagaccccaccgaggaagggctcggtcccacaagactgctcccccttcagataccaagtccaagtgccaccagtggaaccaagcgccaggtggtacctgtatttccgactgactgaatataagtcagggggtttccaccaccctctcctggcattccgtcatttgcgagaatggcccacaatcctcaggaagccctttgcttaccattccctgcttgttgtaaagggtatgacgggctgtgccagctggcagaggtgcatagggccaggggaggggcgtgggtgctgagcccccatgtcctctctgggcaagccgtcctcccagcaccctcctgcgttcactgagctgaaagcttgctaccttccccccatcttttaggagtttgatgtttccttgggtacatatgattgattaaatccttgggtattggtgattaactcaatctccagcccctttctggagttggggatgataaggcagaaagtcccaacccactcaatctgccttggtcttcctggccaccagcgcccatcctgagactccctagggccctggccttcagtccgctccgtaacacgcagaagacactttccactctggagatggcaagggcttgaagggctgggacagagactgaacgtgttcgttactgcttcgcatcgtttgggccattgggtgccatgggcaggttgggcgtcacaggcccacaggatgctggttgtgggcaggtgggcttgaggctcctcagcagccgctgatcagactcagcatggcacagagagagcgtgactgcagggcagaaccagcatccctcacaagccagggagtggacagggcctgatgtggcagccctggaccctgtgcgtgccaggagcgggatgcatttgcaggggccacctccacttcacaggccctgcctcctggagggtttgggagctgccatggctggccagccacacagagacgtgttggctgcccctggttctgctggagcaggcttgctcatccccagcactgccgatgtttgaggcagatcattcttccatgtaggggcaccctgtgctatgtggggggttgagcagcatcctgggcctctacctccagttgagatggccacagatgcctccaggctgggcatctctgcttgaggggagctgtcttggcctagaacacaggctgggggccgctggtccagcaggagccttcctgcctcgattccctcttggcctgcggtgagtgtttgcagctctccccccgtctgtctcctgactttccctgggctgggctggtcttgttgtgtcaccctgtttctgccagaccttgagattccagtcaaaataaaacagcggtggatagaggggctgagtgtggccccccgaggccctgggacatcttttaccattcgctgtcacagccgagatctcccctgtgtcagtgatcctatgcaacatccccagataacagtgcagggcagataagtgaggatgtggtgaagggaaatgggggagtggacgaggggcgtccccggggaggatggcgcctaccacgggcagtaaggaggtctgcgtgagggatgcagggacacaggaggccagggtggcatcctgcctcctacttgcgcaggtccagcggggatcagagtggaggcctcgcaccagctctgggacatgaaggggcccgaggcagcccttgtggccacacgggccttgtcatggttcggcctttccactctgtgttccgaactgtgcagtgtgtatgtgtaggcacagatgtgtgcccgtgcccatgcctaggactttgcgtgtgtctgtacgtgtgatttcgtgtgtgtgtgcatcttcgttggcgacacacgtgtgcaatagttcttccatttcattttctctggtttgggttacattcacccaactatgatgttgaaaatattaaatggaaaattccagaaataagcaattcatgagttttaagccgcacgcccttctgcgtagggtggtggtgtcccccatggtcccacgctgttccactcggggcatgaatcgtccctttgtccatcagactcaagccatagctgctgcgtacccactggtcacttgggagccagggcggttaccggattgactgtcgcggcgaggcttgcggggcttgtgttcgaggtcggtagagcctgacactcggtcacggtgcccacgtcattcccccggctccctctccgcggtcacggtgctcacgtcgttcagccggcttcctctcctcacacagagctgatgctatccttggtcatccagaagaagggaggacgtacagtcagatatttacagagagactcacgtgtacacggctttaactacagcctgttattagaattgtcctgtttgattactagttattgctgttaatttacacactttgtcataggtttgtatgtagaggacaaaacgtggtgtgtgtaggactcggtattacccctagttccagcatccgctgggggtcttcgatgtatcccttatggagaaggaggcttctgtctctctccacatacccttgtatatgacgtgtgtatatatccttatatctttttttttatttttttatttttttgagatggaattttcgctcttgttgcccagactggagtgcagtggcaccatcttggctcaccgcaacctctgcctcccaggctcaagcgattctcctgcttcagcctccagagtagctgggactacaggcatgcaccaccatgcccggcgaatttttgcatttttagtagagacagggttttaccatgttggccaggctggtctcaaactcctgacctcaggcgatcctcccactttggcctcccaaagtgctgggattacaggcgggagccaccacgcccagccccttatatcttttgaatgggtcttttacattgtacagaatttaaaaggtgcaaagcagcattctgtgaagttttccccagaacccagttctcctccctccccctccaggtatgtgtgttctgcctaacacaagtgcacgcctgcatgcacacacaccccacgccatctgtgagagtgcgccctacgcctttccacgtttcactcctttggcatatttctggaaggcctccctagagcagtgtgcggcgagtggcctcgttcctccacacagtcgcacaccattctgtccagtgcaggctttgattcgttgatgggctgtctcatggctggcacatacagaccgtgccagtgtgagcggcatgcaccttccagtccctgtgagtgggcacgctggtgggttaagccctcagaggtctgtggctggcaccagccttcatcaagggcaactacaggaccctctgggtggtgcgagaatgtgccgactccccagcctgcatccagggcacatgccctccctcctccgcatcttcctcaagccccaggcagtgaaggggcctctccttgtagtttgaatttgcgcctcatcctcagagacagtgtgcatgggggatggaaatgggaggagatggcccagaggaatgtacaggcacccacctttccggggccacccccccacaagcacaccagttagcaggtcctggacatgggggcctggcctgggctccagggtccctgggtgacggctgtgtagctttctccaagtcactgaggcattgtgagaatggggactggtggggtgaccccgaggacctcactggggctgtggatggaacacgcccaggaggcatccgtggaggtgggtccatcagcgtttccaccttgagtacctctcacccccttgcagtttctcttcttggcccattttgcagagaatgtttgtgtccttgctgtggactccccgttttctgcgacgtgggccctgtgtctttgttgtaacatatatcgtatcctggaccatgtggcctctggtacagagacgcttggctcgccgcacatgtctgttggactctggctgtggccgtttctcaggggactgtgtggccttgaagtgtccgggacctgctggtgtccagtgaacacctggtgaaggaataagtcagtgggtgccaagagatggtttggccagaggcttgagcttcacagatggaacctgggccctgagaggttattggtgtcacatggggccattgagacgtgcggggctggaggagcctctgccgatctatgaggccgatgcccctgaggccgagaggcccagacagggaccccgcatcccctgctctaccaatgcctcctgggcgtgttctatccacagccccagtgaggtcctcggggccaccccaccggtccccattctcacaatggctcagtgacttggagaaagctacacagccatcacccagggaccctggagcccaggccaggccccccacgtccaggacctgctggctggtgtgcttgtagacagggtcgccccggaaaaatgggtgcccgtgcattcctctgggccctctcctcctgtctccatacccatgcgcactgcctgtcctcagttccggtagggggagggcttgagtgcccggaggctgctctgcccacatggcgttgctgggcccacccactcagcgatgagtcatggacagatgagatgcccacctgagggaggcggccacgcagtgcggccacggcaccaccacgctgggcagcaagcacgtgtggctgggggtgatcaccctggggacagtggtgccgggtgtctgacggtctccttgtgcccctgcctgctggtggaagattagggcagggcttattcttccacccctgccccaagaggagccactacagggcccaggggatggctcagaggtgccagggtatcttccggacctggcctgcctctccccaggagcatggtctcctgcaaggcactgccctggccctgcgctgagccgaagggcaggcacgcagatcttccccaaccagcccacagaggtgcagctgcctctcccttctcctggaggttttacattctggagaggaggttttgcttcctaaaaagtagctttcatcataacacaggcactgctcccgcctgcagtcctctctctggccaggcagacttggcaagcagcagcaagtggagatccagtgggctggcaggctggaggaccctggctcccaactcgtgcgtctcagggagtgcacagaggggaaagtgaatggggggcagtggtcagaaccccctggcctggaggcatattccccattgctgactcttattatttgggggaccttgtgggccccgatgacacccacccgggagtttagttttgataatccaggtaccccgtggacagcactggactgtgtgtgtctcattcactccaagcgacaggcgcgcaagctaccgatggatgaattctccctttgttacaaatgaagggattgcagctcagaaaggggcattgacgtgcccagccacacagctcaggcagccgctgggcccctcttggccacagtacaggcaaccttggaccgagtgtttacatctcaggcactgcgttccttcgttttaggataacactctgaccctgtatgtgtgccttgaggaccttcagtgccctggagtcatttgtgacatgggcatgtcaccactcagacatgtcctctgcattttgctgcagattccacggtgttttctcatggtgttccagacttgttctgggttttgagccgccgtggtggtggggacagcaggagatggctcccgcccagcagggactttgtgggaagacctgggctggcatccactggatttgcccaggcccctgtggtgctacagggagtgctcaagcttgggaggactcctgggctctggctctgatccctccactcactggccttgggccaggtcctcttgctttgttttcgaaatttctcccatggaaggtgagcacatctgggaggtgtgcaagcccccagctagcttgtggtgcccttctggtgtagctgcagcccatagattttttttccatccttccactcttataatgtcctccaaggaacaggaatttggggaggattgaggggcccagggcaggctgggggcctctctaagggtatgagaggtatgcttcttagcagttggatttgggatggagaagttttctgggcttgttgcagagtgcattttccttttagattctggggaggaggagatggatattacagtagtaatggtggtgtgggagatgatgatactgtgaatatgatgagggtaatgaggatataggtggtgatggcaatgaggagatcttggcggtgttgatggtaatgatggtgatgatgatcgtggtgataatggtggagaggagattatggtgttgctgctagtgatggtgatgatgctgctgatgataaggaagaggtggaggactgaatgatgatggtgatggtgatgatggttatggtggttatgattatgatagtgatgatggtggtggtggtaatggtgatgatggtggtgatggtggtgatggtgatggtaatgatggtgatgatggtgatgagggtgatggtgaggatgatggtgatgatgttgttaatggtggtgatggtgatgatggtggtgatggtgatgatggtgatgatggtgatggcgatggtgatgatggtggtgatggtgttgatggtgatcatggtggtaatggtaatgatggtggtgatggtgaggatggtggtggtggtggtggtggtggtgatggcaatggtgatggtaatgatgatgttggtggtggcagggatggtgatggtaatggcaacgatggttgtggtggtgatagggcctacttttttatgtcttactgcatttcatccaccatcttctttaatcctaacagcctaactaggatgcaggcaggcattttacctgcgagatatctgaagttttgagaggtcaagaaacttgcccaaggcccaaagcttgtacctgggaggcctctaaatttgaacttcaacttgagcctgattgattctaaaattggggctttgcccctctcaccctgtgacatgtactgaaaatgattaacattcacttagagggctgtagggtccctgtgtcttgtcacagccatgccaagtccccacccacagttgggatgcctggtgctaatcctggagtgtaagcgtccatgagggcaggttccggggagcccagagtccctcatgggttcacagccactgcagtgaacagggaagggcctgccccatggggtggacccccagctctgtgtgctgggtggctggaggaggcagcagtgggagatgactcagcctggtgagcctgatgagtcagcacaaggtctgaccttgggaggcttcggagccgggcacctgtcctgccacgtgactgctggtgcacctgccccaagagccccatgagagtcagcagcagggctccgctctcctccacctcctggaggtcattgagtccctgtaccaaaccctgggaccccaaaatcccacctccaggaatttgtcctggggcacaaggagagacagagtgagagctcaaggcatgctccctctcgagaatcgcagtggcgaaccgtcggagacagcgtgcactccaggtttcagactgagtggatctcagcccccagggatactcccttccacaagcagagaaaattcgtgatgttttgagaactgaaaaaaagtaggtttaagcagcaggcaggatgattacagtgttgctgtaggtatttgtctggatatagatgtatgtatttctatgaagacatccagaaagctgaaatactgaaatgaggatttggggaaatgaggatttggagtggctactagagtggtgggattatctgtggaacttactttcttgtctgattttcttctttttatacaaaagccatgtttactttcatatgcaaaagcctgttactcaaaagcggttttgctgctgctctctttgctttgaaactggcgtctgggattcagcctggattagcgatcgctgcttaggagtgccgcgtgtttcccctgcctggctccttacctggaggcctgggtgcagaggggagacacgctcttggtgggaggaaaggggcctagggcgctctgatgatttagtgctgtcagacgctggggttctgagccaggcccttgcccgtgatggctggtgccaggcctgcttcacgtgacagttcacgctggcttgcttctgtccaggtttcgcttccactctgtgcccagggcaagcagtaacccatgtcctgcatcactttcactgatgcagtcaccacatgtactcaggattcttggggacagatccaggccaggctctggggatgtctgaggaggaagctgtgtccctacacagtggggcctcactcaggcctgcaggcagggcccggtcccgttagcctcggaggcagtgcatggatctggggccagcctggaacagttctatcctgggttctgattagggctggcccacccatcccaggtacctcagcctggagcaggtctgtcccgggttctgattaggcctggcccacccatcccaggtacctcagcctggagcagatctgtcctgggttctgattagggctggcccacccatcccaggtacctcagcctggagcagatctgtcctgggttctgattagggatggcccacccatcccaggtacctcagcctggagcaggtctatcccgggttctgattagggctggcccacccatcccaggtacctcagtctggagcaggtctgtcccgggttctgattagggctggcccacccatcccaggtacctcagcctggagcaggtctgtcctgggttctgattaggcctggcccacccatcccaggtacctcagcctggagcagatctgtcctgggttctgattagggctggcccacccatcccaggtacctcagtctggagcaggtctgtcccaggttctgattagggctggcccacccatccctgttgcctgggagattctgagtcaagtgcaaaatgggggttggggaggcggggttgccagaagggtctgcagcaggcagacccaaaggagagtggtccagttcattaaaaaaaacaaaaacaaaaaactcaaaactaaaactttccattttttgcttggtctaagtcctgcccttttctgaccaccctgggggtcctgaggagtgagggagctatgacttgtggggagggtggggtcgtttccctttggagaaattctgctcctccttgggaggtaggaggccccgggcccatccctctccaggcctggggaacgtggagggaattctcacaccacgacagctcagggcttggggctggacaggcagaatgaggcagtgagccagcccctcccacggccccaggctgccagcccctcccacggccccgggctgccagacccctgcttctcgggggtcttggtctcttttcaagacccaccaccgacgctgattttgtttctcctctaaagtcaggtaaatgtctatgatgtgtttaggaaatacagaaacacctcaggagaccctgtcatccaagaagcctcctgttttctcgctatccagcaccgtagccatcagccatattcacgatacctccttccagtccttttttctctgaacatttatgctggtgaagtgtgcgctgaaatacggttttgcctctggtttttctcactcatgaacacgtgatactgttggttttttttttcctgggagcctctcttacaaagttgactcatccgtcctccacttggggccacgtggattggtgtccatgtaggaagtcatcttagtgacagctacgtctattttttccccagacatgctgcggttttcccagcattgtatagcgtttcctgagttggtcacatcctgctgaccgtgatggtggaagcattttagagaatcctcttggcgccaatcctggtgaggaagggctgtttttacctgtgcgtgccagatgttggttgggggtggtggagccatgattacttgaggaactgcagagtgccgtggaggggctcccgaagcccgctggcctttgtctgcttgaagccacagctccaggccttcgttccaacagagggcaggcacccgacgctcgggagctctgtgccccatggcaaagctttctctgctaacaccccaggtttgcagcccttgtgctgtagcggaatagggccatgctttgctgtccgcagtatctgatggaccgtcaactggacattggacattcctgaggagtggcgtgggcaggtgcttattcttacacgtcaagtgggttgggttcatttgagtgggttgggggagcgtcaggaggcccctaggctgcagttagccagggcacagtctgttactgtggagcgatggccctggcagaggagagcactgctgtcggatggatgtgcgtaaacaggtgggcggtggtgtgttctgaggaggaacctctacttgggtgggaaatgcacgtctcccagctcagcaggttcctgggtgaggcctgaagagggagattgtgttttcagaaatcaaagacacgttggggcaacatccagatgccaaggaaggagccaagtttctgagttaagagaccttcgtggacgctcggccaggcagctgcctagtccgagacctgtggcatcactgtccgtgcattgtctgtggtgtgagacctgtggcatcactggccatgcgttgtctgtggtgtgagacctgtggcatcactggccatgtgttgtctgtggtgtggacagggcgctggagccaggaggagtggggttgggccttggacctcgcctctgtccacgcctctgtccacttctgctcacgcacagctcctgaacccaggacggggccgcccccgtttctcctgcaaaagaaccaccatgattctgaagctcacagacctgaggatggtgtatgagttccccaaggctgctgtgaccaaggaccacaggccaggcagcctctacacgactggtgtggagccgcccgtgcttctggaggccgggggtctggcatcagggccccgcaggtccgcttccttctgagggtcttgggggagaagctgctcccggctgctctctggctgcccgtggctcaggcagcccttggcttccacctgcctcccgccagcctctgcctccaccacatacagccgtcctccctctgtgtcctaacctcctcttgtagtgaggtcaccagtcatattggattgaggcccaccctaatggccctcgcctaacttgattacatctgcaaagaccctgtttccaaagaaggtgacagttacaggcctcaggggttagaatctcagcatggttttagggggtcaaaattgaacccataacaacacacagtggagggggctgtttggctttggatggagccccaagagaacctaaggtcggctcagcagggtctgaccagaggcggggcagggaggccttcccgtggcccccgagaagggcctggctgcactgctgcaggcacgttcctgagggtactggaggacaggccggaggctgcatcccagcgtttggcacagtaatgggttcagtcttgcccgttgctcgtgattctttctgtttatggagctgggtgtccagcctcacctgtgctaagtaagattcacctgctgtgaagtcacgaggtcctcgccttgcgccctggccggcgtataaataaatcacgacgaaaggtacactgaggaagcgccctcaggcacccagtgaactgcggaccttcatgctggctcccggggtggtgagggaccacagaaggcccatccccagcacggaggagcagaggggcaggctcgcaggcagctcgggaccaccaggagggctttgtccccagcatggaggagcagaggggcaggctcgcaggcagctcgggaccacctggagggcttcgggccgtgttgagctgtcagcgttgggccgtgtgatttctggggctgaggctggggcttggtcccgtgctgtgtgtgttgactccgccttgcagagaatctccattagcaagggcttcatgaggatggggagggaaggatggtgaatgcagccgagctgtccctgctgcagccccttcccttcgtctgcttccccctcccagactgtggtgggacacgagaggcatcggggatttgacttgtgtccctcccactccagtacattaatgactggctggatgacccttagtaattttttttttttttttgaggtggagtctcgctttattgtccagctggagcacagtggtgcagtctcggctcgctgcaacctccacctcctgggttcaagcgattctcctgcctcagcctccctagtagctgggattacaggtgcgaatcaccacgcccagctaattttttgtatattcagtagagacggggtttcaccatgttggccaggctggtcttgcactcctgacctcaagcgatccgcccgccttggcctcccaaagtgctgggattacaggcgtgaggcaccgcactcagcctatttttgatagctttgaaaacacagctagcggcagaccgcgaaatacagcctctctgctcccttccttcacctgctcccctttcgctgagatgctgtcctgcgttgcctttcgtacacccagattattcattttgttatttattagaactcacttattcagcattcgttacctgcggcatgtcagcccggatggggcagcagacacagccacccctggaaatctccttccttctaaactcggaacttgatctttgggatctgtggcgggagctatgcctggcgagggcttttgggggctcggccatgtggattctgtggccagggctcgtgagagtctgtgtttaccctccgtgtcctgccactttgtgtcccctgagaccttcagagatgtcgcccctttggtgttctgattgtgtccacgtgggctggcctttcttgcctctcctggtagaactttctggaaaccacctacccacccctcttccttccacctccttcctcctcccacctttttctgactcactcttcagtaaagcatgtgcaacacctcccttccctgggcagaagctgttccaggcctccggatgggcagaggcagtgcctggggtgtgagccttaactccagatgtgcggccctgagggctgctgagagtcaggagggaggggcccacctctggctgccagggggctgggtgttggcagctctgctggaatcctgggtccctgtttactgctgtatgcctctctgagcctcagtttcctcacctgtaatataatgaaaggttgcctctgcacagggtgggtctcagatccagggcaaggctggaagcagcacagggcgctgtgcctgtggtcagggccagaattccagggtgcgtctatgcaggtgcaggagccctgtgcttcccacggacggggcttcctcccctgggtggctcatcccctggccgcccactgggcctcatgcttttccatttgtaatccttatagaaacaaagtccttggccgccagcgtgggtgactccagtgcacacccccgcagcacagggcggctcacttgcatgttcaagtgtaatcaaggcgagcctgtgagatcacggcaggccacgcgtgtctcacagcctgtgcgcgtcttgggagactgcaaaggggttaaatggcccgtgtacctccctgcaacactgacattttgagcgtgtgtcaaggtgtccctatagcacgcccacctgttgccttccctggggccctgtccctgggcacaggtggcctcgtctctcctggaccctccagccctcccatccagtgggctcttccgacccccagcagccctcgcctaatgggaggtgcccccgccccacctgtctgctgttccccacgtgtctcccgttccccgcgtgtctccctttcccggagtgtctccctttccccgagtgtctgccctcccacgagtgcctttctctgagctcctcctctgcttccatccctgtctctgagaaaccctcctgggcaaccctgccaccttcccatgggggtctctcctgatgtgcccagggcccgctgatgtgtctccatgtgtccctcttctgtgcacagcagggtcccttgagagggggtttctgacaggagagccacggccgactggtcatcgtggggagcagtgggtggtgcaggaggtcacagtgagccggtggcctggtcaccctccagcctggcttgtctgagttttgaatgtgagcatgtcacagacccaggaggtggggctcctcctctggcatccctggcagggcgtttgctgccttttcctcactggcactcagggaccagccactcttggctctgtggtgcagcccggccatttccagacggttcctgtgctcgggaatatgctaacatcaatgctggaagattctcctgatgccttcactgagctctagggagcactcacggctgttctgagtcacgccgtattcctccttcctccctggagtcctctcttcaacacaggtcctttcactgatgatctgaggacctgagtctggtcccttacgtctctcctgagccgtccctagcacaggcccctggacactgtttcacctccttgagctgatgtccgtctctgttaatgtgtgcagagcctgcactgagcctctgtcatccagcccactgtggatgcccctgcgggccctgccgtctctgcctcccagcctctctggggtccatctcccccactctgtttgtccttctgacattcttctttcctctctgtctcatctcctgagcttggggttgtctggacttgagacggactcctggccctgtggttcggccaggcgctcatctcgccttcccagcctcctccgtgaattagaaaacacggatttccatctccattgagtgtttggttctggggcagggttgaggctccagtccgcagtgtgatcttggctccacctgctctggcctttccccggctgcccttgtggctgcgccccagcccggggctcccagcctgaacctgatgcaaggccatgctgacgtccttccggcccttcgtgactctgtcgccatagaatgtggccccctcgagctcctggtgggtcctgaacaaaaagaggatgtatcacagctgcacagagtctccaggcccccatggctgaagaggctcctgggtgcagtctggagattggccggtggccctcagcccgcttcccaccacccccggctcgcggcccctgcgagatgggattctgtggaaggacaaagccgctcgcgagcatgtgggagccgtcagacgccctggtttatttccaccctgcacttgcgaagcggtcctgacctcccggccgacgggtgttatctcaggacagccggtgtgcttggctacatcacccctgtctgctggtgggcccctgtctggggcccccaggcgccctctcctgaagggcctgcgcagagctgggggcccgaaccattcctcaccccaactcttcattgtgaaaattgtcatagatacaaaaccgtgaagagaatcacactgcagacacccatctgccccccacaactgtttatgccgtgtgtgggttccacagctgcttaaaaaattgctaaatgttcttcattcctggatatgttgatacacagacgtttacccattcacagatgcactgatgcattcttagacacccttatacttgggagacccacatgtcctggtttgcacgacacttgctggtttcaaagctgaaaatcccgccttgtaccaacccctaagtcccgggcaaggcaggaggaccccgggcaggagacaagtgccctcccccagggctccttgcctcgtggttaaagggatgcagaggccagactcacactgtgcctggtgtgtccacagagtcatggctgggaaacatgctgtaggtgacctttgtaaaagctcctctgagattccatgcgtcctggggcatctgtggaaaccctgctcctgtcgcaagcaagtactgccagggtgctgcgcgtcctgttgaccgagagcttcgttcacaccttctgtgccgcacacgtccagcacttgtagtgtgtgagacagatgtgggggccggggtaggcactgggggtggcactggggctggccagctggagccggccctggagagaaggccgggcatggggtcagcagagcgggcctggcctcccagtcaccggggccagaagccactggctgcttggggagaagccacgcactgtaagaactcagcgctacctgggggattcatcctttttctttacaatttcaaccttctagtttattcaaacaaccacaaccagattctaggaagtactcgcttacaaagcctccgtgtttcccaggacgccccttcaggagccaccatccccgtccctcctgaacccaggctgcctggaggagggtggacaggtatgtgtctctccaggtgagagagctgcgttggggaagacgggaacagtgataagagttcttaattagcacgaatctgcagcccctgcctttgtgccagcagaactgatgaaaagcactcgtatctgcccatggtggcagccggcggctcggtccgacgagcttgtccccaagcaaagggaagcggatggcttgaggctacagccagtctttcttcaagtcctgggcagtggggaggttgtggcagcaggcgtggccgaggacgctctgtccgtgttcctctcggatgggcttcgcctagctgtgggggccatgctcgccttcctggggggctccctgtgcctgactttcaaggcagtcatttccctttatggttttcaccctctgtggtcataaataaatccctttctatttacaaggtgattctcctgcggtttatgaggacatcccccacgggtccttctggcccctgttccacatgaagggcactctctagactgttcctggggttcacagtcctggcccccgcccccatccccccctctccaggaggggccctgtgacaagaaaggcaatgcctcttccactggggcttcaggggagggccaggtcattgcgggggaccatggaggtacagctcctgtccgcagagaaccccctcccagccagccctctctgcattgcacatccctcctggggctgtcagcaggccttgcccctccaatggcctaatggtttccaatcctcaccctggctttgccctagtttgtgcagggatggtcaggtctgtttctacactggtggaggctgtgaagagctgaactggggcttctagaatacagccaggcacgtccctactggttctgtggggtgcaggggtcatcctttcctttgagaaacaccggcctggtgtgctgattctctgggaccctggagctgggcctggggctggggatcactccaacagagctcaccagccccggggctgctcaggagtggggtgggctctcagcagggagtgagggtcccatcagcagtcaggcagagctggggacagcgctgcaggctttgaatgggaaggtggaatacattcatacagtgtggccaataccgccgtaaccccgccgtgctgattttctaaaattcgagcattttctggtcgaggcctgatgagcctgaaggcccaagtgatcgtgtcttctgcagtggccccgagggtgctgctggatgaagtgcacatcgtgaggcctgggagcatccctaatgcatcacctaatgcatgggatcaggtgcagtcacctgggagcatctctaatgcgtcacccgcccatgcactcgggatgctcctggagcctggccgcttgggacagggtcccagaggtcttcctcctgcctgcaagtcacagcacgaggcaggaaggtggcattttgcctgcgcatggaaaccagggagtggcctcgctgaggccggatgggctgcactttgtcccaccagatgggccactgaagcccaaaacttcttcctgcctatcccaccctctgtctagggctgcagaaagcccagcgaggtgggtcagcagcgagatggtgggaatagggaacagggagttgcccagctccgaaggctgcgtggctctgggctcggcagacacccagctgcttgcaggtccgtggggacccctaggggtttggtgggcacggctggggtgggagcgtcttgtccgagagaggccttctatgggtgtccagtctccttggtgggccggtggacatctggatctgggcttcatccatggtgagttcattgttgggcgagaaacaaaaccagggctgggctgggagcgtggatacctgtggtcactcgggggatgccctgtgcagacccagcgtgtggttggctgaacaatgcactccccaaaagatgtccgggttctaatccctggaacctgcggatgtgtcatttcgccaggcaagagggtcttgcagatgtgattaaggatcttgagatgggggcgtgactgcggcttatccaggtgggtctcacaggcagtcacaggcgtcctgggaagaggaggcaaaaggggcatgaggacaaagcagagagggggtgatgtgaggcagggagcccaggggtgtggcggcctctggaatctggaaaagcaaagggaacagattctccccagagaccttagaagaaatcagtgacaccttgactttagccagtgaagctgggctcagacttctggccctcagagcagcaagaggataaatgggtgctgtttcggggcctggtttgaggccattcgttactgcagccgtgtggagctcctggaagcatgcaggcactcccgtccctgcctcagtggccccggaagcgcctctcgcagaacctcggcactcactgtcctcactgtcgtcacctctcaggctgagtggcccatgaaagaaactggggatgcagcaggagagagaatggcagagtctgtctccgcgtctatctcctgggaacataaagctgccccatgcctgaggcgggggctggatgttctggagcctggcttggtgcatccctggtgagatgtctgcggtgacacgaccacatgcctgctgggctgtgtgttctgagaagacggagcagggccctggggttgagtcccctctgtaccaccccctgcctggaggtgcacaagcacatatgggtccagcctgtccttacgtggtgtgccagggtggggtcctgttctgagcactctgttcatggtaacctcagttgttactcttaagagccctgccacatgggcgcggtttttatggccattttttacaaagggaaattcaggccactggtaagtggcacactgggatttgaacccagtaagtgtggcgccaggctctgtgtggacacggaggttaacagcaggaagcactggggtttctgattttagagaggttgtttctgcactctttcaggattgtgggtgcagtcgagcctggccaagccgtggatacctggatactggagggtgggagttggggctctggaagtctctacacctgccccagtcccccacaggcttagcagcggcacagagccactgtcccaggctctcctgcctccccaggaccgaactgcaccgtggcaggccaggagcctgtgcactgacgctcgcctctgccaagccttcatatttacctttgtgggatagattgaattagaaaaaggccatgcgtgcagttttggaacaagagacctcgtaaatactttattggagcaagctcaggatttacttgctcataaagttgccggggatggctttgcctggtgttgggtaacggattggcgttgtttcatattcatcatctgtaatcaggtggcctcgtccgcacccgcagctccgtctgggaagtcctggaggcagcgtgcacagtgggcccttgctatctgtaatcgggtggccttgtccacgcccgcagctccgtctgggaggtcccggaggcagtgtgcacagcgggcccttgctgctctgctgggcagtatagcctctcctgggccctgtggccactgggagcaggcaggtggctttcgtggcccatctgggattgaggatggctgtgctgggggttgcctctgaggctctcctttcttcgtgaggctgcttcacacccattcttgtctccccttgcctcctgacaccctgggttccccataggcccccctcgcctgcacagattttcacctaggccctgggaggctggtggagtcctgggttctagaagacctcagagacccagggcagagtgaatgtcaggggttgttagaagcaaggactgcccaagacccattgctgagggaagaaggagtgatgaatgagatggataaacacgtcagctgttcggctttccacattcatgatctattttcaacctccatgtcctgatgtttaaaatacagcagctaaaatatctagtggtcttttcttcctcttctgagtgcagccacgacatgccacatctctgcccatggtcagtggccgggctgtacagagcctggccttcttgcctttgtctctagagggtgccgtcagggttggatctgtccatgcgggaaggagcctgaaccccagactcttggacctcagactgggagagggtgtgggtgaaggcacatggaccagtgattgattaattgattgactgattggtttatagacagagtctcactctgtcgcccaggctggagtgcagtggcatgatctcagcttactgcaacctccgcctcccaggttcaagcgattctcctgcctcagcctcccgagtagctgggactacaggtgcccaccaccacacccagctaatttttgtatttttagtagagactgggtcttgccatgttggccaggctagtctcgatctcttgacctcatgatctgcccactttggactcccaaagtgctgagattacaagtgtgagagtgcagggccagaggatggcaaagacgggctggccccaggatcctcaactgttggcgtcaggaccggactcagggcctcagtctggcagcatgggcgtcacgctgcctgccgggcagagccctttgccccacctgaaagccctgtggtcacagcgtagagtctggagcggcatgctggggtgggaagcgctgtcctcgttgctctgggccctggctcaggagcccctgagagcggcttctgctccccgagcttcctgcgctccctgaaagttgtgcatccagtgctgagtcccgcgggcctgggggcgtcggccctcctccctggctgtgacatgtgggttggagatttgcctgtgtcttagtgaaatgccagtggtcaaattcaacgggaaagaggaaaagaaagcatgagcctgagtccagggtggaggatggcggcgtcgaggaaggacccggggccctgcttctcccaccgtccccagtccacacccttctgggatgggggcagggtgggggaactcttgcctcacctccttttcctctcctcgtgcccactgcccccttggtgtcctctctggtgaactccagccacctctccctccacagggcctgcagcgtctccaggtccctgacccttgggtggcatctcccgcctcttcctcagggccctgcaaacctctcctcttatttcaccaggagctcctttccttcccatatttgtgtaaatgaattcacatattttgacttaattgtctcagaatggcccagtttggagttggacttttctgatgctcataaaattcaggaggcggtttttaatcagttagttctgctacggctgcctcctcagagaagggaacagtttcttgttcttctatttttgttttttgatgttgttgctgaggacaatttaatttgatctctgaatcatccatgtatccatccgtccacccacccccctacccatcctatccacccacccaccatcccccatcctatccacccacccaccatccaccatccatccaccacccccacatccatcctatctactcacccccatacccatcctatccacccacccacccaaccacccatcctattcatccatccatccacccacccagtctatccacccacccacctatcctattcatccatccccccacccaccctatctatccacccatccacctatcctattcatccatccacccacccacccacactatctatccacccatccacccacactatccatccaccctcccacccatccacccaccaacctatcctattcatccatccacccacccacccaatctactatccacccacttgcccaccctatctatccacccatccacccacccacccatcctattcacccaccccccacccacactatccacccccccacccacactatccacccagccatccacccaatccacccacacaccaattctatccatctacccatccattctacctatccacccactcaccagccatccatccatttatccatccttccatccatgcacccacccatccatcatccatccctgcttccatcatttcatccacacacccacccatccattcatccattcttgtgttgggtgctccatccatggcatcagcagatatgcccagggcagcatggcacaggaacccccatgcccatcatgtaggtgctcatgggcacttctgctcactctggccggggtaggggctgttgggcccatgctttgtgaggtcttctcagagggcatcggcggttgtagcaggagcgagtagaagggagcctggtgtcccagggtgaaagcagggaagagcagctccactgagtccggctgtggccgcagagtggcccagcctgcggcatcaggagagcccaggcccgtggcctcggggtcttgcactttatgaagggagcaaggcagggtgtgacagtagcttcgtcctgagaccttgcaaacatacatgtgactggcctctcgaggtggggagtggtggccgaggccctgtgatgctgagagcccacgaggtctcagtgtcgctggggatggggagaagcctcagcccggagcagggctgcatctgcaggcctctgagcctggcacggtttgtgcctctggaggtggctggacccctgcctgtgtttctgttttcctagatgaggagtttgggctctcgctggctagtgaggctgagtagtgatggtgtcagaagccagggcccaggtatttcttgaaccatccattccagaacaacttctcacggcagtgcaacccctacaacacaccttcccttctcctgcaccctgagtgggagacgctgaaatcaccctagagcacaggagtgcatgagaacccaggggtaccgggggcccaccttgacaccatgtggtattcagggtcagaagctcccaaagttaccctgattgctctatccccaaaatatttatgtagccacgtttcagtgacccggaggagagggatacctaggacagggagtggctgtttcacatggggggcaggccctgggcacctcggagggcctggccgggcacctgcctatgttgcagaaaagcatctgccccagacgcttgttagaaaacagcaaggcaggctccattccagacacttgcagtggggagagattgcactcagctccactacagcacggggcgctggggatttctggagtgaaggagtggacagaaactactcaggggagctgggcttggtgtcgggaggaggaagaggggctggagcagacatggaggggatctcagctggccgaggttgaggctctgccaagaagagggctcggaggagcctgaccaaagttacaccatggagggagtccttgtcacctgccgtggtacgacactgtggatatttggagaatggcgcagctgtaggaggattcccggaggaggtggtatcgatgcgggacagcccacgctgcaggctcagcttgtgtggccgcctctgccagcagacaggcccctcgccctgactcagtgtgttggctgcctctttggagtcctgttgacaggtgtgaacaggtcccctggaggtctcggctgtgtggacagggccaccttcccacctgggactgcccgtgacagccaagcacactactgggcgggcagggacccaatgctcgcttccttgttctgtggacacttcgctccattcacagcgtggttttcctccccagaagctcttaactccagacggccctctccatctctctgtaattacccagaagagggcgagctcggccctgcagcaatgtgttctgtgggctgcagggggtggcggcggtgagcacaaactccagctgtcaccttcgaccttgcaggatgccctgacggcggtgggatggatgagcatggtttcgccagcagccgcagcctgttgcgtggccctgcgcggtgacctgtgggacgggacgtgccgcgtggccctgcgcggtgacctgtgggacgggacgtgtcgcgtggccctgcgcggtgacctgtgggacgggacatgtcgcgtggccctgcgtggtgacctgtgggacgggacgtgtcgcgtggccctgcgcggtgacctgtgggacgggacgtgtcgcgtggccctgcgcggtgacctgtgggacgggatgtgctgcgtggccctgcgcggtgacctgtgggacgggacgcagcccgtgatgtgtttgtgacgggtgtcggtatcaccttttgagcaggtgtcttggccaggtccctggcgtgagttggtggaggaagggggcggctcatcgctgagtgccaggctgatgtgaacttcccggggctcagcatctttcttggaaagcctgcagacaggtgtgcaggaggaagagccagcaggcccagcacgccccatttaaccgcatcagagcctggcacggcggcccgaggcctctgctgggctcctcacggtgcacgtcagaaagcctattgcccttcgtatttcctacagatactttaacagaacttggtccattttcttggggaaaattttagatttatggaaaacttgaaggcagttcagaacgttcccatatactatgcacctacttttcacctaataattattaataggacattttaacattcatatacacgtttgttacaattaaagaactggcattggcttgtcatcttcagctgaagtttttatggtatccagaattccttagttttgtcctttttctttctgagatcccatccaggatcccacgtggtattattagttgtcacgtctcctaggacctctcctggccctgacagttgctcagactttccgtgttgttgatgaccctgacagttttgaggagcgaagttgggtattttactaaatgaccttcttttggaatctgatgctttccccatgattagaatcgggctgtgggtgtttgggaagaagatgccaaagtgaagtgcccttctcatcacatcctatcggggcatccactgtcatgagtgtcacatacttggccttgagcacctgcctggggtcgtgtgggtcaggttcctgccctgtgaggtcgctctttctcccatagggtgctccttggaagagcatccctaggtgcagcactcacttatggagtgggggagggacaggccgcctccatgaggacacatccactctacttggattcttcagcgtcggagacatgcgttttctccccatttcgtaatcggttcagtcactctcactgtttatcagtgtggactgatagatgcgtttgtcctttaggctgcgatccagggctgctttatttaccgggttgccaggtatgttagctctggccatgggcgctccccctggcactcgtgggctccgttggcacagcccatcagtgactgtgtgttttgagctgttcttcacttcttggcaccaccagtgactcctggctcatcctgtctagctcctgtcctagtctcagaaacagccgttaccccagggagtgtgggtttctttcatcacagagtactattagaaacctaggtcttggccgggtgtggtggctcacgcctgtcatcgcagcactttgggaggcagaggtgggcggatcacctgagatcaggagttcaagaccggcctggccaacgtggcaaaaccctgtctctactaacaatacaaaaacaaacaaacaaaaaaacatcagggtgtggtggcgggcacctgtaatcccagccacctgagaggctgaggcaggagaattgcttgaacccaggaggcagaggtagtggtgagtcaagattgcttcactgcactccagcctgggaaatagagtgagaccctgtcttgaaaaaaaaaaaagagagagagagagaaacaaaaaccttggtcttggtgtccagcatccttgttgctaatggagtgtcattcattgtttctcagccttcttggccgacagagggaggagatgcatgaatgtgtatgacccaccagtctattcacagccatgaatacaccgtgtgtaaccaccatatctatgttgaggttaaaggggagttcactcgggcgtctccaactctgatcaccaccccgtggattattctagccccctcccgttgcctgtcggtaaactcccactgcaacagtgaggaactggcccccactggccatgcagctcactgttcagttcaagtatccgcgtatagcactatcgcaatcatgagtctgtcctacgggaagcacctttatcaactcatgcacagtgcttacgatcaggtccttttgctttcagtcttacagacctcacccctttccagaatcacaccggggagctccttttctccccagctccctcagggaggttatttcacacatttacaacacagatgctcctaacgccagataaaagtcctgcctggaatgcccaacctagtaaatgatattttagatttgcatagattgaagttcactctttagtggaattgtgggggttttggcaaatgcatgacgctgtgtgttcaccatcacagcatcctacagaatagtttctctgccctaaaaataccctgggtccaactattcattcctctttccccgccagaaaccccagcaaccattgatcctttgactttctctgtagttttatcttttccagagtgtcatggagtcggattcatagtgcatgcagccgtctcagactgaccttttgccctcagcagtaagcgtttaaggtttccatgtgtctcttgtggcttggcagcatcttgttatccccgagtaagattccacttatatgaacgtgaccaccttttgtttatccattcacctgttgaaaagtttcttggttgcttccagtttggggtgattttgaataaggcagctataaacattcacacgcagctttctgtgtgggcagaagttttcaaatcgattggctaagtacctaggagtgtgattttgggatcgtatggtaagagtatgttctgccttgtaagacgctgccaagctgtcttccaaagtggctgcattatatcggacccccgccggccgtgaaggagcgttcctgttgtgccatatccttgccagcattaggtattttttgatttttggaattgagccattctgggaggtgtatggccgttacctccttatttcaatttgaagtgtcctgatggcagatgatgttgagcaacttttcatatgcatatttgccatttttttggtgaagtgttcattcagatcctttgcccatgttttaattgggtcgtctgtgctcgtattgttcagcttaaaggtttccttgtgtgccctccagataacaattcttcatcgcatttgtgtttgcaaataacatctctctgtctgcggtttgtcttttcatcctcttcacagtgtctttgcagagcagatgtttgtaatgttagtaaaatctaatttatcaaatggttttctttcatagagtatgcatttgatgcttatctaaaagctcatcacccaattcaaggctccatagatttttctcctgtgtttatttctacaagtttcatattattgtgtttcgtctttaggtctcaggtccactttgaagtggtttttgtgaaagtgtgaggttggcgtttagataccatttttcctttttgcctgtggaccttccagctgctccagccccgtgctgagacctcctgtcctccgtgggattgccggtcttgtgggtttgtgtgggctccgtggatgttggaaggatggccgcggggcccctttccttcactgtggcagcagcccctcctggtgatcctgcagcttcctctgtttcctgtaatctgccgggatacacaccaaggccagaagacatgatttccactcggcttggcattggcaccacgtatgtgtgtctaaagaaggttaagcagaagaaacctgataatagttgaatttttctggaagttcagtcttttctgtaccatcctggacctcccaagttggctcctcccaagacaggaaagtctgcagtaagagtcttggtacagtgaaggatgtgttgtctccgtcactgtccccggagccagcacgtgcccggcagctgcaggtctgggggtggcgggggaggcagccccacaggcgccgaggatggagaaatgcgtcagcacccagagggcgccgcgtgcaggctgggccagtgccaggggtcgcgacagcgcacgcaaagagtgcctgtgatgctgctggtggtttttgtaaattgtgacacagccctgcccccccaggtagttccatcccgctgtgcttggagagcaggcagctgcagagaggctgagcagctttcttaatgggggcgagtagcaggatggaaactgcagcctctgtcgtgggaggcccacgctgttggacccagcagcctcctttcttggctcatccaaaatgagacactcacaccctaggtgcagctgaggcaggaccctctgtgtctgtccctgacccacgcctgggctgatgtggaggctgcagggagtaagggcctcagggccatggccaggacgagggggagggaggcacaggcctggcctgggcactgaggctgcccgtggagtccgtgttaggctgacctcagcaacacatgccagcaaggacggggggttgcatattctccagatgctcccaggtgacccggcaggcaggtgtgtgcacttaccttactcccaccatccaggcggggaaatggaggctcagtgtgggggaaccttgcccggagcggaggatgcgatcctggtcaggctgggacctgctgtctctgcaagccaggctggggtgggcacaggacgtgactctgccggctctgtgaggtctggcctgaggctctggtgggtccttggggttgaggtggacttgggaggtgacgcagctggcaggagggctgtttcagggcatttggcagcacaggctaccatgttccacttctccacaggcccaggccaggcgcgtggggacatggggaggctggctgctgccccacgggacccagcttgtgggggtgtcagaggagcccctgccttggcacaccctccgtgccagtcccagcccctcctgcttcctggtcatcgccccctttgcctctggagtgtggccttctgccctcccctgctggggtcctgcaggttccaggcccagaagatctctcctgttcagatcatgtcgccgatcacagcttcctctgcaggtacccaggtgccctgtgcctggcttttctcccaggtgggatgccaggtctgctaaggagggcatagacgggtttgctccctgtgcagccccaggggccttcgccaccccctccaggagaggcgatgcttggacctggtgagctcccagatgtgctgttgagctggacgagcttggagaagcagagctgccatgctctgtgtccctctggagccagagacagggcatggctgcccccgggaggattttaggccccttcgtagggtgtttctccttaagacaaatagccactgctgcaaacagctccgcggccaccaacagttatgggaagtatcagacacatcggcgtgtttgccaatccttacgtgtgccagcctcctgcaaggtggaaggtgtcaagttaattaggagatggcacctggggctgtgggtgggggctgggagctcaggcgtgcagtgtgaccaagaagtgcagagccgggcgccgtttcccttagacctgagtaaagaggagaggagtaaagaggagtgtgagggccacagcacactcgcagctgccgggcagaggggaagccctggcccctccgcaggccctgccggcggcctcctgaaggaagggacccaccagacgggtgctctggggccccagcggctcccctcgaggtggactccacttcagcaatgcttgcttgagggctgggcctgctggggttctctgcttcagccccatctaggccctcccaccctcagggcctggccctgggctgactctcccctgcttgctcagctcacacgccctctcccaggcctcccatcctccggctcaggaaggacagaggcggaacaacccagcggcccctcctcgtcctggcctcggcaccccggggctttgggaatgaggcactgtggagcacagctgagcccgtagctctgcctccaggcccccctccggatgccccacagtccacagctccctgggccccaaccctcgctgctgctggctttgctaagtccacctccttcctgtgtcccctgtgcctagaaacggtctgaaaggcacatgcatcctcttaagattggggtgggcacatgttttaaatactggggagtcacaggttgggtcacactgcatggtctccactagagatggttttgcccctcaggggacatttgatgatgtctggggacagctgtggttgttccaacgtgggatgcatgggacagtccccagcacagagacccaactctatgtccacatcaccactgcaggaaaccctgggatgcttgggacggtccctagcacagagtcccagctctgtgtccacatcgcctctgcaggaaaccctggatcacagccccctggatgggagagggcagatgccacccggcaacgccgagtgtcctcccggcagaggagtgcgggcacctgggaaattggagctgagctggggtcacgtgctttaaaacctcttgggctccagtgttggctggggagccccagatgtccagggatccctgggtcaccctgtaagctgcatagagagccagcccagagaagccaatcccagcctgggaggaactgacctgactggggtcggggcgggggacgagcaggtggagtgggaggctgcgaattctagattctctaaatagggtgctctgcttgcagaacgggggcgggggatgagcaggtggagtgggaggctgcaaattccagattctctaaatagggggctctgcttgcagaacgctgctgggcatctctggttggaggcgagctcgctgaatgacgtgtcccctgtttgccccaagttactccctgaccctggcactgaccagcacatgatgccttgtgggtggggtggggaaattctgagaggggcaggcgcccagagctggtgacaggcacagagaaaaggaggcttgctccactgctgcctcggccctggctttggggcgtgcgtggcctttattcattgcctttgttgagtcgtcagcggcgtgtgatgaccaggtgtgcgctgttgtgtccacaactttccagcctcgctcgggcccagggcaggtggccacgccttcttactacacaggttcacgggataattggtggggccaggtggacccagtgaggcgctaatgatggaagtctgtgcagtgagtgccgcttccagaacaatgacagcgtccacgtcttcaccgccctccatcaggggccgcctagaagccacacaggctgcagggctggctaccggggccctgaatcacgggggcgatgagccccaggctccaggcgctggggaaggaagctgggcactcggctgtggggcttttgtttctacctgaaaccagccagccaggccccccgaggaaaagcaaagtgagcccaaatctgccccctatacccagatacccagtgtcccaggggcacctgcatggggggagcccggcgtgcgtgctggctctgggatgcaaggcccagggtcaccgaggacaggggaactcggcgtgtcctgcagccaggggccggcgctctggaatgcagcgtggagtccctgcaggaacgttctggagggggtgtggctccccgccctgtcctttctaaggacggacctcctgggccaggcagaggcagagctccttcggctcacccactcgggacggtcaggggaccggggctgggatgacctgccatctgctgggagaggcagggggcccttggtgtgctccggggtcttggcccctctgccaggccaggccagggtgaagtgggcaacctcaggctcccctggcaggagctgcagcccacccaggtgagcggtccctggtgggcagccccacccagccacatgccttccatgagggccacgctggacacacgcctgcccggcctttccagcagggactgacgtagacaggcctctgcctggaagggttcccttggtgtcctggtgccccggcaccggtgcggcccatgcaggcgctgagtggctcgcgtggatattccctgccaggcggcagcatcctcacgactgctgtgagtgtccccaggtctccagctgtgcagtgtgagggagctcttggaccagagcccctgctgcctcattacccagatgcacagccccggcgtcacaccggcctcccgagccccgtgttaactgcagaagaaattagccagactcaggcgctgggagcaggtaattagttgctcttgcccgaccacagcttcgtggctggatctcacgttgagaggacttagggggaaatctgacgccctccaggtttcctgacatttgctagacatcgcggaatgtaaagggtctgcgtggccgtgtgggaaggacagcagggggcctagggggcagctgggatgcggcctggtctaaaggcaacttctcagctcctggctgtgaacgggcgatgggacccctgagccccagcccctgtaaaatgcagacatgcgtgcccacctcccaggcagtacgggtggcaggggtccagccagacacacggctcggtacagggcctgcaatcctgtgttccttcatcacgttgtcactgagtgtcatgtgaaaaccaggaatccacattctccagggcctaggccggacgtggtcttcctaaaggtcatctcctacctgggagttgggagcggctggggtgcaggtgtttcctgtgggcccagggagaccccacacatgcagcttcccggccaccgtcctcaacccttaccgccacgggccctgcctgcctcccacctaccatgggcctgcctggtgtgggttgaggcttttctgatccagtccagagacggacgggtgttaatcccgcggggtgattttacacagtgagaaacccagtccagaggcagatgggtgttaatcccacagggcagtcttatagagtaagaaaccaaggccactgtccttgctttgccccgacccctttggtgccaagttttggggtggggtccagagttacaccctgaggtccaccctgaagcccactgcgctgctgcctggccaggctgggacctggatctctgagctcggtgcctgccacccttgcggggatactagggtgaaacaagacgcacagaacgtgccgggccctggagaggctgtgagcaccctgggtgttgaagggtccccttggctggggaagccccctctggaggccgttctctgtgttgggcattgaagggccctggccctgggaggtttttcagtcatggatgccttgggacctggctgcggaggccctgacccctcctgacggggagcagcagaggctggaggcctcctcgtcatccctgcagagagaattgaaggctccagggcggagtctctgcagccccaggcggaggctgggctggagtgaggtcactgcttggcctgcagagttggtggcaggcatagactacaacactagagaccccatgggcctgcagcatcctcagttccactagacggctgcaggcgtgcacttcctggggctgagaatggtgctcacagccgtcctcagtcctggcccctggcgccctgtgggacaggagtttggcgaggatgagtgagggtggggccaggccccatggaggcaattcccaggggctcccaggggctggaccacagggtctcccagcagcccgaagagccaggccgcccccactgggcagcaaggaggaggctgggcctcctggaggactccagagccgacctgaaccccacgacctttgcggggaatgaaccagtgaagggatgaggagggcacgaatgtcatctgcccaccacggcagggagagtgttccagcatggctgtggcctgggagactgggcaggtggtcgttgcacagatattcctgaatgttggagagagggggccagcgggcaggagcatgggtgtgtttgtggaatgttcttgaaacaatacagcttatcttcagcggggctcaccacccacgtgcaggggctcttctctcttccccacctccctctctctcgagctccctgctttgctctgtgtctgtctgtctgtctgtctgtctgtctgtctgtctgtctgtctctccctctctctctctctctctccatctctccatgctttgctctgtatctctctcttttccctctctctgcatctttcttggtgcaaattcctcctgaacggagccaagaagggaggcttctctagggagggattggtgggggcggctgggggtggcagtgggtcctggtgcttctgttgtcgtgaccatgtgagtgcgtttgtttaaatgacttgtggaaagttacatattaagtcatctttagttaaagtgaagatgaggatatgggaggaagccagaacgtggaaacggtgaaatactgagaaattgaatgttcatttatagtgttgatttgatttctcagggatgtgtgtgccactgtgtttatttctcacaatcgtgggtgagaaacagctccctagggcctgggcgaggcccccacgctttccagggggcagcttgtcactcagagggcctggggtcacagggcctgttgacggtgcactgcccccactgccctcagctgcccggtgcacagactcagcaggcgagaagtcatggccagaggagagtctctgtccctttccttgacgttcactcactcgctcactcactcactcactcactcatttattcactcacttattcaatcatttactcattcacccactcatcactcacccatcactcactcattgactaactcacttattcactcattcactcacttattcaatcatttactcattcactcatcactcactcatcactcattcgttaactcacttattcactcatttattcactcacttattcaatcattcactcattcacccactcatcactcattcattaactcacttattcagtcacgcactcatttattcactcattcactcctttactcattcactcactcattcattaactcatttagtcactcactcattcactcaatcactcaatcactccttgactcctttactcatttactcattcactcattcacttattcacacattcaatcattcactcagtcattcactgatttactcagtcactgattcacccactcagtcactgattcacccactcacccactcattgacacactcggtcatttactcagtcattcactcactcactcactcactgagtcactcagtcaatcactcagtcagtcattcattcattcaccctctcattcatctactcattcactctctcactcattcattcactcagtcactcagccactcatttagtcactcactcattcactgtctcatgcactcacgcaatccttccttcatctgccttttgccagtcattcatgaagtgcagcccttgttgggcttggggacaggaaggagccagcccatggggcatctgggaggagcttgctgcactctttggtttgtgtccacaccaaagaggaaaagcaagtctggcccaaagcagggtcccagggagccattttcctgaggtaggggggatcctctgtcctggtcagggaggtgcccgggcagcagcccctactccaccatcctgcccgggctgttctgggcctggggcctggggacggagaacgcagagcacagccggccttgttcccgttgtggcctgttgcatgcaaacagagctccgtccacctagcaccagctggggccagagagcagggccagcctgtcccaagccagccagggctgggtctgagaggttgacgtgtgctcgggcagcacagtgggcaggcgtagctggtggagggcacagctgcgagaagcagaggccaggggcctgggggcaggcagcccctgaggctggtagaggcctgggaggagctagggcttcccagtcttcttcagggcaagcacaggctgacctccagccactctgccttcctggccgcctctagcaaccgtctcccagtccctacccagggggcccagaaccttccagcagcagctcctcctccgtgagggtgtctgtcttcccaggcgtcactgcgcagcgcatttcaggggctcttgagcagcccctgcgtgtctgtctggagccctccatcccagctaaggggggcagagtcccaccagcactccccctttcctgggcattgcacccatgctcagtcctggcctggttcctcctgtgtctgcaggacatattcccaggcctctgcaggtgcagcctggggacctgcgagagaaggaaggggtttctgggggtggcactgggcgtttttgattcagtgtccctgaggagccagtgcagggagctgaaccacagacgctctggcttgggtcctgggggctgagcagccccagtcattgttgtaatcgcagccattgttgcttttttatttgtagtgtcatcttctccacctgcttctgtcggatttcacaggtggctcttggcacacttggcccaggcagagcttgggaggagctgtgggtccagggcgccttcctcctccctcccagccacccacacacttcctgtgggccctgcccacgtttgcaggtgcacaggcagtggccagacggccaggccgcaggcagttgctcccggcagtggtgggagccagctgaagattccagaagggccatgggaggggctggccagtggggacacagggaggtgttgccgtcagctggccaggtcgcttcagttgatgttttcctgagatcgttgactttgctagcaacaccaacattatatttcacaactatgtgagtgagggcagcctgggcccgacgctggctgttccgtgggggaaccgggcttccatgatctcctcgcacacatataattgcttctgttgaagtcagactgtgatggaggagttgattctgggatttaataacaaacttgatttcactgtaacttaaatattgagactatgatactccatcagatcttaaagaatgcattttctgtgtttttaatcctcatactaagtgtctgtacaatcagcgataagactaaacattaggcacttaacttatgagtcagagcagagctacctgtgtgggtcgctccgagtggaggtgaggtcttctgttgtgggcctgtgtggatcgctccgagtggaggtgaggccttctgttgtggggagacgctccctggaaattgctgttctgtccttgatggtgcccccacttgtggcaggtccctgctgcctccgaaccccaggagcccccagggctgctgctgtgaagcctggagatggctgggcctgaggcctgcagcttggggcagagctagtgtgggtgtgggctggtgccctggctgagcaggagtctggcatcttattccaggagtgacaggatggggcagctgtgcccaaggaggacagcctcagtgtagggcagagtgtagtccagctggacgggacaggcgcggggccctgggaggctgaggccagggctctggaccctcctggcccctgccccaaggtatgggcagtaggggcccaagtgagcaaagccgggcttgccagatgatgtgcctggccagctgcaggggccctggctcggggcttctgggagagtggaagggaggtgtctgcaggtgagcagcctttccgagtcactggctctgccccaacacctgctttgtcagggtacagacacctgtatggtgggcagggctggggatgcctgtgggggcctcttgaacagggccgtggctcctggtgcgtgcctgtgtgtaaggatctgtgtgcatgcgtgtacctcactaaatgagtgtggcgtaggggtgcatgtgtgcctgtgaggagtgtgagctcatggtggcatgtgcacacatgtgcacacatgtgcccatggcaggaagcctggtgtggctggtctccgccccggagctctgatgtctcagttcgaaagcggttcctgctaacgcctcctcgcctgtctgcccttctcaccttgtctcttggcctcggtccacactggctggctagtttcacccaaaataaaagcggtaataatagtaacatcctaattgatgtgcggagccagcgttatcggcagcaaagtgcctttacccctgtggtcatgaggcggccttgccagcctgagctctgccgttatccctgctggtctcgtatctgtaatgaaatcccgcaccctcgctcaggtgtgtggtttgtgtgtttcgggtgtgcgcatctgtgtgtgcacgtgtggggcatgtggtgtgtctgggacgaggcagagtagaactcacagcctctgtccagcccaaaccatcgacgtccccaacactttcacagccactcccgcccaccgagcacagccgagccatttcccacacccgcagaaactctccttgaggcctttctccttccggtttatgaataggtcttctcctgtgtaaagccttgaaaacagagccgagcacagatttgggacctgggatcctgaggctgtcctgcccgggggtcactgcagagggagtcttgtccttctaaactgacaagacagtcgctgaggacatagtgcaaggggcggccagggtattagaaaccacacaccttgagattctcagtggcgaagagcactcacctgcgggtatcgggggctcagggaacacacaggtgtgtcctgtcaccacgtcctggcagtgccagtccagttgctggcgttgctcacaacttcgtccttgagagccactcctacaaggcaaatgactggtcacagggtacacgtgtcttagacccccgacactaagccctgggtcaccacacacaggcaatacccctcccctgacactaagccacacataggcaacaaccccccccacacactaagccctgggccacacacaggcaataccaccccccccccgacactaagccctgggacaccgcacacaggggggaccccgacactaagccctgggacaccgcacacaggcagcacccctcccccgacactaagccctgggtcaccgcacacaggggggaccccaacactaagccctgggacaccacacacaggggggaccccaacactaagccctgggacaccacacacaggcgggaccccgacactaagccctgggtcaccacacacaggcaatacccctcccctgacactaagccacacataggcaacaaccccccccacacactaagccctgggccacacacaggcaataccacccccctggacactaagccctgggacactgcacacaggggggaccccgacactaagccctgggacaccacacacaggcgggaccccccccatcccccgacactaagccctgggtcaccgcacacaggggggaccccgacactaagccctgggacaccgcacacaggcgggaccccgacactaagccctgggacaccgcacacaggcgggacccccccccatcccccgacactaagccctgggtcaccgcacacggggggaccccgacactaagccctgggacaccacacacaggggggaccccgacactaagccctgggacaccgcacacaggcgggaccccgacactaagcccagctcttcttctggcctcacttcctcccaggccccagctcagagatggtgcccatgcaggtgggcaggacaggctgaggacaccccattgccccacccgtcacttggacacaggctggtgtgtgagcactccctacgggaactctgggcggccccacggcgcctccttttctccccgttggggacctgcccccgggccccaccttcccagtggcactgtgggtcacctcgggccgccccctgccctcaggcctgcggggcccctcagctgcaccttgtttttggtctgaccaagcacagagctgacattcgtgaatggtaaatgccaccctcttggtctgtgcctgtcaaagtcattttggatattcatcctgtcatccgtcacatcagacatcctcccagatctgtgtcacagcctggcaggatcacacggtttgtgggtctgcgccccacgggtggcaggagctgctccagagggcccaggctgagctccagacaccctgagggcctgtttcccgccagggaggccccagccctggcccctgagtggctccctttgtcacacctcctggagcctgggcctgatctatgcccacctgaagccacatgcaggtgcccccactgccccaccagcccccgcctagcacctggaagaagggggtaccgcttgtctccctgggtccagccatctcccctgtcaaaacttggctcacttataaaaacagagtggctggacttggacctgtacccacctctactcagtccacagcatccttcctgccatcacctgccggggtcctggagagccagcagtccccagggtctgggcagggctctgggaattttgccggatgctttctccattgctctccccctcatccacaggccccaaatcgtgaccgcacccccccaaccccgccgcccaaggcctgtggcatcagctctgtgagctgtttctgtaaagtttgtaggaacccaggtgatgatggtgctagcctgggtgggttgtggagggcgtgctgcagcccctgaacccagtccagcccctgcctcgctgtgccagtgcagcagatggggccggcgccaggctcttcggctctttggctctgcaggccttaggctcctggaggccaccagaccactcctcagttcctgtcctgggacggtggaggctagatctggccctcagcagggctcccaggcaggtctaccatgcagctctgctggagggtggagggtcccacgctgcgtgggagctcagagctggcgtctgagtgggcatgggggcatgccagcacccaccgccccctgcatgccgatgagggacatgaatgggcccacggcctgcggaagctcctccagcctgtgcgcccagtgcagacacagcctgggctcccttggcaaccaaggctggcttatctcagctgtcacggggagtgtgcttctaagggggggcttcccctgggacgtggtctccctttttggcttagacacagccagctgggtgggcagggcagggcagggctgggctgggctgtgggtgatgagaggcgtttaccccggggccatttcttgcagaggctgggcgggggctcctaagtgtgcaagctcccccagccacatggcgcacagatggtgcccggctcacacctggctctgcctgtcaggggtcttctctgtatggcaaggagctaggctgcgtccctgtttcagaggccaggggactctgaattaggaagtgagtggtctgcccaggctccccagttggggaggtgttggtgggggtctgccctatgggacaacttctgtctgaagctgagaccgtgggggcaccgtggcccttgttggggcagtgagaacagtggggggctgttggtgggggtctgccctacgggacagcttctgtctgaagctgagaccgtgggggcaccgtggcccttgttggggcagtgagaacagtggggggctgttggtgggggtctgccctacgggacagcttctgcctgaagctgagaccgtgggggcaccgtggcccttgttggggcagtgagaacagtggggggctgttggtgggggtctgccctatgggacagcttctgcctgaagctgagaccgtgggggcaccgtggcccccctgccagggcagtgggaacagtggtccgtggtctctggtggttccctgctgccttagaatgtgccaggtggccacattctttccacagaagggggtctctgtgaaatgatgcgtgacaaacaccacctatggaaaggaggtttcatatgatcaacccatatgcagcccgacagaaagtcaaatttggggatgtgttccgggaggggctggtcctgggggctggaggggtggattctttattttttaaaatctctctctctgacttccgatttttgccacacgatgatgtcactgcctttctaagaaaactcccccaaaggcagctttgttcttttccattctgatggtggctgcccctccccactgcactccctcccctcgcacacgatgccctccccttccccctgcacgccctcccctccaccccacacgccctccgctcgcacacaacaccctcccttcccccccgcacaccctcccctcacacacgatgccgtcccctcgcacacgcgtgtgcacacggcctcgctaactgggagccctcggaggcccccggtccaggccaacccagcggaaagtcggtggggggacctgcaaggtcccatgtcctctcagcagaggccactccccaagcactcggcctgggctttgtgggagttggcactggagaaggaattgtgattacttgctttatttttgaatgtttttccttctggtcttaaaagcaatgcaaactccttatttaaaaacaaaaaaagatgagagaaaagacagaaacaccatcccctatctccaagaaaaggccggcgccgtgggtagaccagcagcacgctgaggggggcagcctgctggcatcgtgggtggaccagcagcatgctgaggggggcagcctggtggaggggcctgcacttttctgaggggggcagcctggtgaaggggcctgtgctttgctgagtggggcagccctgtgaaggggcctgtgctttgctgcgtggggcagcctggtggagcggcctgcgctttgctgagggtgccaagccctgtggggaggcctcgccactgtcccagccctgccagagccccaggggaccccagaacctcccaaatggcctccttccagaagttgggcaggtgcaaaggggcggcccaggggtccgggtctaccctgtacctccagacagcagggacacctccaggctatcatgccccacaggcagccctggtgcggcctccacagctcctgactcctggtgggcccgccctcccttctgaacccccctttctgagaatgaggcgattttggagctcgtgagcagaggggcggtcagcactggatggcagccaagcatcacccagcactcggagccggaccactgaggaccctgtccctgcagcctggagaccaggccggcctggacccctccccaaaggcctcacagtgggcagagattggggtgtgtgggagtgtacatgccgtgtgtgtgactgtgtggtctgtgtgtgtggagtatgtggtgtgtggcctgcgtggtctttctgtgtgatatatgctgacccatgtgtgtgggttgtgtgtgggcacgtgtttggtcagtgtgtggtatgtacattcacatgtggggggtgtgtttggtctgtgtgtgcacgtgtgtggtgtgtgtgcatgcacacgtgtgtgtgagtcctgtgtggtacacagggggaacagctgtgggagagccagggagctccactctagagctccacacaccctggctcttggctgccctggccctgtcagtagtcccagaaggaggttttggggccactcaggtattgggctaagtgttctcatttggggaatgggaccctggggttggggtgagtcctgggccagcccctggcctggcagagcccatccctgcctttgcatctgctgcaggctccaggcatccacctgctggggctgagctgggggtcgcgacagcccagaaagactgagaggcactgcaacccggctgccatgtggatctcagatgcacggcctccagcgccatgggataagaacgtgtaccgttcaggctgcccggtgcgtggctcgctgtggcgatctgttacgcaggaagctcctgcaaggccctgatgcctcctctgggaagcttcccagtggccgcagggcagaggtgtaggggtggccttgtttcagggctcagcaccgtctcgtccatggagtttggttcgaattgtgtccctgagggctgagagtgttcggttggccgtggctggtttggggaccgcctgggtgagggtgacctgggattggagaccctccagtgtgcactttggtgtggccctgcccagtgcgtggcacctgtgccccttacagaggaggagtccagctaggagggacaacagcttgcccaggggctggccatgccaaagccctggccggtcgggtagcacctgaggggtgtgctgtgtggttggcggcttagtgactaggctcagcagcagggctagcaggctttctcaggctcagcagtaccccagcactgctgtggccatctccccatggcaccagctactgtaggtggatgactccagagctgccccattttgggccctgccccaaggaggcagctggccctggggtggcctggacaccatgagtctctgctggggctgatgtcagagggaagggtctggggtcaaggtggcggcaacgcagcctggaatagtggagtggcccagagccaacctgcagagcttaacacagcagctggggaccatcctcagatcacagtgactttccttctgcgtaaatcacaacgtaagaacgtgtgctcgggacccgtccagatgcgtgttgccccacagcatggctttgacgcagtaaccgctgttatccagagagaagcagcacctcatcctcccggatgctctttcctcgtggtatttattcatccacttcttctcttgctcatttggtgtcgcccttttctgggagcagtgtgtaattttgtgtgcaatttggtagtggaagtccaagttcccgccccacagccttcggggagggggccccgagcgggggaccagggttttgctcatcgtgggaggggcttgctggtggggttggttcatagtcccaggggaggcccctgctgccccagcatccttcctgtgaacttatgccaccccctccccgcagccacgcaccagccatgactcagcaggcccttatgcactgggctctgcagcctggcctggggcaccttggacagctccatgccctgcaccatgggcagaaggagctggggcaggccggtctggtgcccactagagtcatccagtgcctcctggtcacaatcagacacgggcactccccagggttgaggacagtctgagccgtgttgggtgttgggatgagagagctgggcggcctctccaagttcctccaagccgcaccctgccagcacatgtgatgtctgccctggccagggtgctgggctgggggacccagaggtgacaggtgacaaggcaggtgccagaggaggggccgtctaaggttatcataggagaaaaagtgggatggataaggaagggcacccaggctgtagaaacggctgctggagagcacccgggcattgcctgcaggttcctctctgcaagggtgggatggccacccttcgtccctcacgcacccaccacggctttcctcggagtcacctccctgccatcctgttgtcctgagccccccaggcagcccgcagactctctgctgatccccacaggctgggagccctgagtccgtgcatctctgatgctgcggccatctcccccagctggaaggggcccctggggaggacaccaaattcttttctaaccgccgtggccccagggccctgcacagaggagggcttgcagcaggcactcattacctactcagatgaaggagtgaggcagcgagtaagtagacatccaggtggttccagggagcaggtgcccatgtggagctggatggcaggggacctggcactcaccgttcagggcagatttgggcagcactggctgagggacaagctccatcctgccctggggatgctgggttttcatcttcacctggagcacgggcactgtctttatttgtcagtgttaatatttggctgtgattggtggtggccatgctgcgttttaccagcagagtggtatcttaaattccatgggtttatttgcagggtagaacttcctggctgttcatcttcccgcacctgagatgcctgggctgtcgggcccttgcagagacagccttctccttggaatttaggggatgcggagggggcagtgaggaaagccagggaaattatttatgttggcacctttggaagaaatgtgtcccttctctgtaccacaggtaatcccagagcctgactctgcccccggggtccttcctgcttccctcgtgccctgtggggtatctgtaatgtggggagcagaggtggtgtgacaagggagatggggatgcagggtgctcctgtgggagcctgtccacgacacccatgggtggtgggtgtctgcagagcacatccatgaagcttgtgtgtacctgtgtctgcatgggcacgtgcacccctggggagcatgtcctcatgtgctgctggtgagcctgagacccctggccttagtgtgctcacacctgggtgccacccgtgtaaacctgcgtgcctgtggctcactccaggggtgtgttgcgtgcacatctgtgccttgtgtgcggtcatgtgtgcctgtttgcacacacgtacatgcacatatgtgtgtgtgggcgtgcaccgcgctgtgggagggcggaggaaatcctgaaccctttggcatcgatgcacacagtggtgcccgcctgctcgttcctctgtacccaggcaggcatggcagttcctccctggcagcgtggctggttccacacaacttttgacaagcctgagcgggggtctgacctattttccggctccaaagtgccacaccctggggccagtgtgctggcacttggggatggagaccaagcactgtgcctcgtacagcccggcttctctccagcaggtgcctgattgtgtgcaggggagccagctccctccttgtgatccgaacctttcatttccgggcgtgataaagatggggctgtgtttaatttcctgtctgccaaggcagcaccaccgcctgaacaccaggctgcacacagggtggagttcgccgacttgacccagctctggcttccatcgagcgctccttgctggcagccttcgaggtgctttcggacgctccctctgagtgaagcggtctccctgccctgtggcctggctgctgggggcccctctgtgggtgggctctgggtgggctctggctgtggggtgtctgtaacgtgtggccgctcagtcgcttctgctcctctctgcaggtcagctggccgccggcacctgtgagattgtgaccttggaccgggacagcagccagcctcggaggacgatcgcccggcagaccgcccgctgtgcgtgtagaaaggggcagatcgccggcaccacgagagcccggcccgcctgtgtggacggtaagcacccgtggccccaggacccctccgggtgctgagcgcggcgtcaccaaaggtgcctcttccctgacgcggccccttacctgaaggtccccctaggcctcagcgcatcctcgggtcaggcccctggctgttggcacagctgttcccatggatggtgtgagcttgtggcttggggactggctggggtgcagtctccagttcctgggggagtggtcggggagatgccggtgccctgccttacttgcctatgtttggggctctctggcccaaggctgtggttctctgatgttgcctctgggagaggagaaggacagcagaggggtcatctgcaggatggcaaggtcccctgggtgccgttccatcgtctgcgtgtggtctggccgaggctgccagcgggacctggctccttgtctctgggtctggccagttcaagacactctcatgcctagactcgggaggccgcagctccggcccccatgggctctgagcacatgcagatgagtgcctgctggcagctggcagtgacccccggcccctagaagtcaagcttctgacaagctgggccgtggctgagggatgatagtgttgctgagtgaacacttggaaagggcacctgctatgaggtgacatggggcgggaggggctgtcccggcgtctggtgggagcctgtcatctggtagggaactctgctgtgtctatgctgtgcctgaccatggggagagagtgggcttgactaagaccactggtgaccagctaagttcaggggacagcatgagacctgggaaccccacagccgggacctccccaaggcccagtgtgtcccgggaaggcatctggtgtcaacaccagccaaaggtcacaggtgggcatgtaggcccggcattaaatccaggctgcctccctcccttgtgaccagagtgggtagggagacccctccctggggcagacatgggggctgccatgggcctagccagcagcagccatgtgccagtccaggcagccttggggtgaaggaccccacgcaggggtattggatgccttggttctaggcgcagcagcttgaccacagcccaggagagagtgcagggagggagggtcccccgtgggtgagatgcggagtcccctatgtggggtccctgacgccacttcttggggtggagagaaaccagcatccctgagtgacaggcgtagacttggggttgccctcgagctgcggcccggtaggggcagaggccctgcaaagccagaagaagatagggacaggggctgggcaggtggagtagggccgaggatatgtaggggtgtcgctggccagtggcccctccagtccttggtggacttcagggcagctatatccgtggcatcctgcactgaaacatggttgcgagcatctcaggcctggcgcagtgctcactggccttctggggacgcggtgcagggacctgtggagatgtgtcccatgctcagctggcccaccccatggatggcaggcccctgccaggcctcccagggctggatttggagtctgagtttcctgactctggtcaagggtcctttcctcccccactccccctgtgggggctccggatgcccaacttcggatcccaccgcctctgcccaggagcctgacgtgggcagccttgcccgtgtgctgtgattgagaacacggggtcagggatagagcctgctgctacgtgggtgctggtgaaggtccatggagaagggatggggcgtacagagacagggccaaggcatcctgagcactccacagagggaggcggctgcactaggaaaaagaatgcccgtatcagccaggcgcagtagctcacgcctgcaatcccagtactatgggaggctgaggcaggtggatcacgaggtcaggagttcaggaccagcctggtcaagatggtgaaaccctgtctctactaaaaatacaaaattacccgggcgtggtggtgtgcaccagctactcgggaggctgaggcagagaattgtttgaacccgggaggcggaggttgcagtgagccgagatcacgccactgcactccagcctgggtggcagagcaagactctgtctcaaaaaaacaaacaaaaaaagaatgctggtatcaccgggagaaaggtgttctaataggccgagcccttgatcctccaaagccagatagacccctctaggggttctcagcagagtcagggcatggtcaggaggaggagggctgacggaatcactgagctccctctgggtgtctcattgatgagcgtgtcctaagactgtgcaggaacaggccaggcagtgagtctgccccagggcccactacctggacccctaacccctgaggcctttataggaagggaagaaggggaaggggccgcgggctcttggctgaagggagcatgccttgcccaggtctcagtccgtgcagctctcctggtcacagatgccctgtgcacctgggggttgcgtgcactgctcaggtgggatacccaggaagaaccgtgggccaggtggccttccagctgagccacctgtctatcttccctagacctagcagccgtatgccactggccctccggccaccagccctgagggtttctgggaagctctttggcacttgggagggagagtgtggcgcgagaggctgagcttgctggagtgggctggaggagaggggagccatcagaggcttctggtgcattttgaggacctggggcagggaggagtgggccgctggagccttgtttttgtccttattaaaaacatctatcaatttgcatctgtagaaggcatctgattaaacaccaggtacgcagggcctcagggctgctcagtggctctcaggcctcggttctacagagctggatcctggggcgagctggggcagaggcgtggcggtcttcttcccagggaaggggactgcttctcccacagccacagccctcctggctgcctgtatctggagccactggaacacatggtggccggggcgccttctcggggacactgatgcgtctcaagactgggagggggagagcggtgccctgcacggccaaggagttcacagccaggccgtcctttcttctcattacttccgcccgcctatcggcagagttggggtcaaaattgattactaattgaatctgggtctgctcatctgaaaccacattcactttcctctcaccaggagcctcctggtgcctcaggagccgggtcccagagacccaaattaaaaccgtactgttttcaagggaggccaaacaaattagttagcttagttagctttgcttctttttgcacagtgggcattttccaggctgccatctaatttaatttttgcttttctattttcttgctctgcgtgcataataagtttcctcgcatgtgaattgcatttgctgaagagaaaacttgtgctgtgttgggtcggtgttggaattgaatgtgagtagggttgaaatcggggaggcacttgctgcccctaccgcgttccgtgaccacaggcgctcggaatgccggagcaagcctgactgtgctcacttgtccattggtcggtttcttaattattcatacatttgctcactcactcatctgttgaaagaagatggatacccatggcagcagaagaggtgcatggggaagtcaactcaaaacacccaatacagagagccatgcagtgctgcaggtgcgggaattcagactggggccccagagtgccatcactttttcccgctgggacctcagcaaggatgcatccatgagggggcatttgaatagggtattgagggatgatgaggagctcaccagaaatgcttctctttgtgaaaagagggggccagtggttagagaggaattctagcctccagcctccccggccttgtctctgagctaaagcatttctgggtgaaccatgtccctgcctgtacagggcagggctgtgagcctgtgcacctgcatgcgagatccaacttacggaaccatcagtgaaagattcaaacacaaaccagccacgcactgtggcgctttccatccttacacacagtatcagccaccgagcctcccctcccccagggctgccctctgaggcaggcacccaggtgcgtgatgccctggcgggctggccaggccctgcttctgctcctttctagctgtttatgcagacgcgccaggttcccttttccatcagcacacacgtgctgggtcccgcagccaccacagcacggcactgaggactgagaccctgtgtccgagtccagcgctcacccagcccttgccaggcatgcagtacctggctgtacctggccagcccgcctcgctgaagcaaggtcttcctttatgaagagaggtgctgtctcccacaagttgagttctcctgaaactcctttcccaggaaatcaaagactgcagcccagtagcgggggcagcagagggtggtggtttgtgagcggaactgccccagagctgagccagaggggtgaagggtggtagcctcaagtctcggtcgtgggcgggggcagttttccctgggagcttttggaggatggtaaactgcagtcatggcacagcgcagacccattgtcagggccgcagtggccactgggaggtgcaggacaggccgggctgactgccaggtctggggaggctgtgcccaggaaggggcagggccagagggcctggaggtgggtgttgggtggagccttatattctccaggcatgaggccttgcgagccacctgggtcctgggctgggaaaagaggcagaaaacaggcaggtgggcactgccgggttctgggcagaggtatggtggccagagtctttgcttctctgtggttgggagtttgaggcaggcgtgggacagcagaggccttgcccgctctcaggcagtgtggatggttggcagtagacgcgcagccttaggcgggtggacgctgaggccgtgggtttggcatctgtgcttcacgtgtggtttagagtccaggtgtgaagaagaaggggcaccacgagggggatctgtggtcagcgtcaccttccaccccacgtccacagccctgtcctcatcctccagcagcaggtcggtgcgggagggtggagggtgccctggccacgtacaggagtctggagatggtcctgtccttgctgtggggatggggaccacactgatggcagggccattggaccctgggctgtgggtcctggcagtgactgcaggagccagggtaggagggaagtcacttcttctcttgcctttccccgttgttgaccgtcatcatgcctagctgctcatgatgccctagcaatgtggggtttaattacaggagtgcaggagcaaaagcctttcggttctgagaggctgggcacagcgcgtcatctccacctcgaggcgccaacggggcccccagggccagctgaaggcatgttgtggctgggactagggtgacgggaattttccaccaggagcgacgtgaatcacctgctctattgtacgcaagagactgggagtgcgccaaggtccctaagatgcggtgtctgtggccgagtcagcctgcatctaccagttggtgctcagcctggccaggggttggccccagggtggcagctggagaggctgtggctggccctgcctgccccgttcatcccttcggcaagtggtggttgggataaggaaggccctgcttccctacagttgttcatacaacatggggacatctgtttgaccacagagctcacaggagaccgcctgctggcagttggctgttcatgggcagcccttcctgcgttgagccctgaccacccttggcagcctggcaccccgcactggccacccagcgccatccaggagggggtctgggccctcaccaaatcatcgaggccctgatctgaggaaggataatgaagctgtttttcagaggggcccagacccccacgtggagcaccggctttgctctgggctgtttactgggcacccgctcccctaacaaccttcctgagaaaaggactcatgttccaggtaccttccagtacgcgacggagaccagctgggtacctgcctgcctcaggaggcaccctctccactgcttaggggcatggacatgtcggcttccttctgggggctcagggagatcccagcatttctggaggcttcccgaggccatgggcgactgggtgtacagccacatcctcagccaggttgtgggtcctggccaccctggacccctcatggcttggggtccgtgctttgtggcacagaagctgtgggtgctggtgtggccctctgcttggcaggcattgccagccactgcatcacgcgaccgtggtggggctgtcaggacacatacatctccgcgcagactgctgccacccgcggcctttttgttatggaaccactgctgggagagggtggcgtgttataaacgcttggcaagcggagaggcgcctgggggctgttggcgacactttcttccccagcacacccctccgttccattctgcctggatccagatggggttggagatgccctgggatgcgggcaccatgtccctcagttctgagcatgattggtttgtgaggaagatggtgggaagagaccctgcccccggttccctaggacgtggatgtgaattgcttcagtccagaggatgcagccacttcaggcccagcaggtgggcagggcagggcaggtgtgtctgctgttggagccacaactcacagtgccctggccagggccactgtggtgaagttgtttcagggaggagctgactgcccggcccgacccatggctgtggcgtgagggtacaatggcaactgtgctaaaggccaagcactttgcttcatcagagcccagttttaccagaagggagcaagccagtccttctccagcaagttacccagcagttccttccagatctcggtgcgtttaattgttggaaaaccacacagtagctgcatggctctctgacgcctctgtagagagatgagacggttggagccagggtgttctgctgctgagaacatgaagttccttgaatgtccccctctgtgaagcgcccccactcccagctccagggagcacagctcagggtgaaggagaggagaccccagcattcacgggcactacgtgagcgtcaccagatggcagctggggttggtagataagttgctgatttttgaggtgctgtggggagtctcaggttgggagcacactgggaggtggctgagcaaacatgggtgcccgagcctctccgtgtcccgtcacgtaggcacggcggctctggagggaagggggtggtctccttgctctagcctctccatgtcccgtcacgtcggcacggtggctctgcagggagggtcctgtcccgtcacgttggcgccgcggctctggagggaagagggcggtcacctggctctgctccctccctttcataagggaggctctttcccagggctgtggacacagggcccctgtgctgccaaccaggagagccaagaggaggaggaggaggaggccagacacctgggctgggcctgaccctgggcagaccaccaccctcccctggggctggggcgctggtgtcctggccccctcgaactcttgaagcctgcccgtggaaggcccactgcacgtgggatgcatcgtccacgggcctacagggtttggaaggagcacgcctgctccactcgtgctcctgccttgaacccaccgtcactccttcccatgaggatggggacagcttatgcctgctccacaaggcccccactccgtgtgattcggggacagagagctgcagggtcctgggcaatgggaccccaggctgtgctgcccaggcacgtcccatccctcgtcctgttgggcccctctgccaagtgcaggcctcccggcactgactttcccatccgaatcactcccaacaaacttgggtggggttttaattttttttcgaattctgtcatttttgagccgaatgactcaaatgactaataactgtctggcgtggaggaaaaggaaggggagggctgggaggagctcctgtgtgaatttgaccttgatccagcacccactctgcagcctcccaggcagaaggcccctgatggaagctgggacagatgtggggagagcaggggcaagcagggagcaacctccttatccccacagtcatttcaggagcactgagggctgggaggaggggccgtggtggggcagcctaggcctatggggtctgcgggcccagagctgagtcaggcagcgtgtggtggatctggtagtagctggatgcatcagtgtggcaatccaggaaggcttcctggaggaaatgggcactgtgtttaaaggggaggccacacccatctgtcattgtgtactgggcatggttgtcatccaggatgccccagggtccttcagcagcaggcatgagtgggggtccactccacatccagccctgcccagaccccctggctgctcctggagcaaaccgtgtctgaaggggctggcaggatgcagagtggacagcagccctcactcttctgcgggaaaagcttttgtgtgcttcagtcattagaaaagtgaatgtaagtccttaagtacttggatatttctgtcttggtccactttgtgatgttgagactgggtaatttgtaaagaaaagaaatttattttacactgttctgggggctgggaagtccaaaatcaaggcactagcgtgttcagttgtgtggtgagggctgcattctccagagaggcagaacgctccatcctcacgtggtggaaggtggaagggcagaagggggccaggctcccgcagtcaagtccttttacagcattatctctccaggatggtggagctttcatgacctgaacatcggtcaaagtgcccatctcccaacactgctgcattgggggttaagtttccaacacgtgaatttagggaacacttttagaccacggcaatttagaaatacgtgaatgttcttaacgcagctgtggcctcaagcaggtcccctgagcgctctgagctgtgggcagagaagcagaggagggacagtgtggttgaaggcacggtcctgcctggcttcctgaagccaaacactgattctttttttttttttttttttttttttttgagacagagtctcgctctgttacccaggctggagtgcagtggcgcgatctcagctcactgcaacctccgcctcccaggttcaagcaattctctgcctcagcctcccgagtagcagggattacaggcgcctgccactacacccggctaattttttttttgtatttttagtagagatggggtttcatcatgttggccaggctggtgttgaactcctgacctcctgatccatctgcctcggtctcccaaagagctgcaattacaggtgtgagccaccacgcccggccgacgctgattctttttcagggtgttgcttgctctctagagtctgctagaaccacccttgtggtatactggaactggcttgcaccagattgcgagaaccatgggttaaattttcaggaaatgtgtgaattgacttgtaatactcccattattaaaaacgaaattaccatcctggccaacatggtgaagccccgtctctactaaaaaatacaaaaaatgagctggctgtggtggcaggtgcctgtagtcttagctacttgggaggctgaggcaggagaattgcttgaacccgggaggcggaggttgcagtgagccgagatcgcgtcactgaactccagcctggtgacagagcgagactccatctcaaaaaaaaaagaaacaatgaaattatataaactgacctgtagataaattatactgaaaccaaaaatatccacgtgaacacactaaaaaaagaagagtaaacaatatctacatcaagtggaagaaagacaataataaagatcaaaatgggaataaagtagaatatagaaaaataatgaaaattaccaaaagttctttttttttttttttttgagatggagtctcatttttttttcttttgagatggagtctcttttttttttttttttttttttttttgaagatggagtctcactctgttgcccaggctagagtgcagtggtgtgatctcagctctctgcaacctctgccctcccgggttcaagcagttctcttgcctcagcctcccaaatagctgggattacaggcttgcactgccatgcccagctattttttttcttctatttatagtagagatggggtttcactgtgttggtgagtctggtctcaaactcatggcctcaagtgatctgcctgccttggcctcccaaagttctgggattacaggtgtgagccactgcccacccagcaggttagttctttcaaagataaatgaaattgacaaatctctagctaggctgatatgagggagtagagagggatagagaagaaggaaagtgaaggaaggctgaaattaccacatcataaataaaaggggacattagtacccaccatatgaaataaaaaggttaaagggatactatgaacaattgtatgccaatacagtagatagtttagatgaaataaacgcattcctagaaagacacaaacttccagaactaactctagaggaaacaaacagtttgaatagacctatgttaagtaaaaacaaggaatgagttatcaaaacttcccaacaagaaaagcccaggaccagatggcttcactggtgaattggtccaaacgcttaaagaaaaattaacactggatcttctaaagctcttccaaaaaatagaagaataggggccacttcttaactcactctatgaggttggtattgccctaataccaaagtatcagacatcacaagaaaactacagatctatggatacggacatagatgtcactttgggtttcgtgcattcccacagtacgcctcatccctgaggcacgtgtctctcctgcagcaccaccgtgatggggacagtgacatccatgcctgcatctccagcacagacctgtgccctgagtatgtaaaggcgctctgtgaatgtcagtgggtcctgatgcctccaaatgcctggttgaagcaggttttcagggagacccgatgatgaacaaagccagtgaaccagcaggcctgagctgggagcagagagggaaggatgggggacgctgccgctcttgaacctgagtgatgccttccaggttcttgatggtgtttaaagtgtccactacaccctgctaataatgccgcttgcctcatcttacatatgttaatcagcatctgagaataatcagcgtctacaagaagaaatatctttgaaaaatctttgaggaaattctctccaggaagccgagagctgagggggcccagcatgtggtgctggcgcgggccctgattgcggccattagcagggacattcgtgacgtttcagggaagggtgcatggggtctgcctgatgccagaggaccttgagctgctcccgtccacttccacctccgaaactcagccccacaaacactcctgagggcagggtgggtgggggagcagcgaggtcttacgactgctgcgttcctattatggcccatctggggattccggggctcttctgaggaggacagaggcaggtcccttgtcccgagcctgcagcgttgcttgtccatggcagacgccagatggatgtgcacagcccatgggcgctcagttccgcagctccctgcctctctgggtggagtctaaatatgggttatttttcagcatcctgaaagccacgctgcatcttgcgtgagtgacggagcaccgtgacagttgatgcggccggcaggttcagggctggcctgtcccagctccttcctgaaggttatatggatcaccccattcattgtacaaacacccacccagggcagtactgctgtcacctcctgttaaaagcagggaagctgagccccacaaagggtggagctggccccaagcccacagctggagagtgggggcactgggtcttcagtgctgcagagaacgtctctcttctgtcctggaaatgcccctgctggcccagacctagggcgtcgacgtgtagagagagaaaggaccaggcctgtggccacagtgtggcctcttgggctcccaggcagtcatggaataagggttcagatggacagtgccctgtgctgaggggtgtggagggagcagtgacaagagcctagaggaaggaaccatggcctcagactgcagcgtccaaagaggtcgtgtaagaggaggtgacgcctttgcccgtcattgtcaggagcaggtgcgattaccgggcaggacacccggggaccttgatggtctctgggcagcagagtccggggcaagtctccgagggccctgctgagggcgcagcgccttctggaccccgcggcggaggatccagcattcttcctggcctgttggctgcagaggcgggacacaggcagagaccctgcctcactctgggccctcgtccacccacaaagggacccagaatcatagccgcagccttgttgctcgctgggctttgagcaagtggagaattttgcttcagccaccatggtctggccatggagccaggaggtctacggggaccgtcttgtggagggagggagacattcacagcccagcccaccgtccacagaccagccaggaggctgagtccaagacaggaggcagagaggctggacctcatggtcacattctcctcagggggtccagattctgccttctcaggggaacccagattcagtggcacagagggactcaggcaccaccacagcagctgggctggacggtggatgtgggtggaggaggctccaagtcagggagcccttccgggaggaggcggtggccaagctgggggtggggcattctttgcccttgtcctgcttttctccctgtcatcacccacttgttctcgccctgtcctggtttgatgagggacccagctgctgtcctctctgagctgtgctgggggtggcagcaggggccggtgctgggaaggcctccgtccctggcctttttggtggggcttggcctttttggtggggaacaaggaccagcagccccacagctggcgccctccacctcccttagcgcaggccctgctttgatgaacatacagtccccatgctgtctttgatgtgatttgagatttcaaactaaattaaataacataatgaaaaagccagggacattttgaaagaaaattttattttgatcttggagatgctttgatcatgtgacttggaggggggtgagtggggttgcctccctgttcctcccctgctccgggtgtggggcggggacggctctgggccatgtttggggcctgtctggatgccgagtcatcttcaggttcccagactccagttcacccttctagggggctgggtattctctcaagggctgtccccccaaaaaaaccccaggctcccatattgcaaatcctctaaactcattgtcttcggacacgctgtgccctcactgtcccatctcccagtgcctggcaaggaagttgttgtttgctgacgatggttggatggggcctggactctggagcagaagtggcgcttgagcacagttgctgtttgctgacggtggctggatgtggctcggactctttggagcagaagtggcgcttgcgcacatctcgagtatgtttgtggtgtgaacattttctttatttcatttttttatggggctgtgttgccatcaagaggtccagacccttctagaaatcttggacaggttgtaagaatgaacttaaaaactctttacacagaattttcccctagagacaattctttccagccgataaaatgcccggcagcccccttagccgcaaaatgctgtggcgttggagctgatgttcctgttttcaggagaacagctgcatgtcccaggcgaattcatctcagcacctcgtggaggcagatgactggagctgcggagggtgtgctgggatcgccccactgggctccgccctggctctgcaccttaccagctgtgcaacgacacagcgcgtggccctctcccaggccggggtctctcttctgtcagcagaagtgaggaggctcctcaccttctgggtgggttttgggggtcaggaggtgaagggagcagacactctcagagctcctggccctgggagcaccccgatccgtgcctacagctgctcttacagtctcggagacccagggccggctgctggaatctcagagttagggtcgtgtctcttcgggggaaactctgacgcaggagcaggcacagtgaatacagtcagagctcattcattccagctccactattatggagcccaggacagtgtggggtctccaggccccaggtgacctttgtaggaacaaaggtttgctgagcaaatcatgagagcacgtacggggtgtgtgtccaaatcgtctggacccctgtgtagtccacactgcagttggggtcactggcgtactgctggccctacggtcagggtctgtggccacctggcacagtgtcccaccagagcgcagagagggacattccccatgccccaccctcggccccgagccgcctcgggcacgtcttgcctgctggaaccttgccccagccctctctccttgtgcccttcccacgtttacagaagaaggctgggctgaatggtgtgcaggcctcgaaccccggccgcagaactcgccccgatgaggggaaactggaggctctttcctcctgaccatgcatgatgagccggtgccccgagggtttgtctgcgtctttccaaagacaccttatggcgtgtttccagtcagtagtcagacattctgctcatctccctgggttcagagcctgctggacactgatcagtgcccaggcctggtcccgccctatggggacagtgcagcagggaacagagagggggcagcgtatggcagtgggtgccagatttggaggagatgccgggggctcgttcccccaccctcctggacagcgtcctcctccctgcacatccttgtgagtaatgctctgggaacctccgggctctggagacacagtgggatggaaaaggccaataaaagacaaatacacaagtctgcagaaatgaactgggggcctgggagcctgggagcctgcagagacatccacaggggtgatggtgactgggggctcattggggtgcccactttggggagatggtgactggggggctcattggggtgcccactttggggagatggtgactgggggctcattggggtgcccactttggggagatggtgactgggggctcattggggtgcctactttggggagatggtgactgggggctcattggggtgcccactttgggaagctggtgttgtggctgatacctgcaaatccagaaggctctggccttgtgaatacctggaagccagctccaggtggacgtggggctggggctcggcctgggtggtgaggatgtgcctggtgcctgtggggacagcgggaggagctcacaggaacatggcgggagcacaaggcttggaggttggcatggtgcagggagtcaaggctggtccctgggcaggggctctgcaggccagaggacatggttgattcaaacctgccgggagcctcgggggtgccaggaaggtgacggatcactctgatggccttctacaaaaatctctctgctgctctctggaccataagttcagggcagcaagaggagtctgcagaggtcaggctgggcagaaagtggcagtgactgtggtcgcgtggggaagtgtgtgatgggggtgattcaagggcccaggcggtggggctccagtagaggtgtgagaccgtgtggagggcagagctgaacccaggcctgggtgtatgtgcagcgatgctctgtgtccaccccaggaggccccaggcacacgtggagcatctgttctgccccccggctggtgcgagctcaccggagcaggtgtccagcaggcacggagtgagagacacaggctgggagcaggtcagactggcaagcctgcttgggtgtgggagtgttgaggtcaccagggaaactgaggcggcagctgaggacacagggccctaggcgatgggcacccactagcccacagaggggccatcctggcctacccgctgtcgcagctgcaatggtggcctcccccaatccttgccctccctatgaggctgcctgtggaaggaagcagacctcccacgcagggagcccgagaggtgaataaaggtctcctttaatcattcagaccactcggcagatctggcagctcatgcctcccacaggagcagagcctgactgatgggagcgggagctgcaggagggacgtggggatgcttgggatgctccgggacgcagggtggctggatgagcagggtgctgggcccctgggtgtcttagctgcggttttctttggctttaactttttgtcatttttaagtgtctctggctcattttagagccaggtgacttaacaaaggtttcatttaccattgggaagggaaggatatttctaatctgagttatggacatgtcaacggggtgctgcttctcaaggtcaagccagaccctgcagttgggggcactagagtgggctgaggggccacattggggttaagtggcctgcatctttataggtcctgtgcctcactgccaaagtcaccttggaccagtcaccttcccactggtgacgaggggagacgcaactgtaggcaaagggcaaagtgcagcagccggcacacggtgacttagggcctttgcaagcatgattttacccagctgactctgtctctatcaccacctggtggcaggaaactaaaattgcaggcatacttgttcagaggtaagcacacagcattgctttctgtggtttcagttacccatggtcaaaggtagtccaaaaatattaaatagaaatttccagaaataagtaatttgtaagttttaaattgcacgtcattctgagtagcatgacaaaaattttgcgccattccactttgtcccatccggtccatgaaccctcccttttcctggcatattcacactgtccaagtcagctgcctattagtcactaagtagccgtcttggttatcagacggactgtcgtggcatcatagtacttgtgttcaagacacccttatttttcttaataatggccccaaagtgcaagagcacgggtgatgctggcaattcagatatgccagaaagaagccgtgaagtgcttcctttaagtgaaaagatgagaattctcaacttcataaggaaaggaaaaaaatcacatgctgaggttgctaagatctacagtaaaaaatcttctatccatgaaggaaacagacctcatgctggctttgctgttgcaccccagactgcaaaagttatggccacggtgtataaaaagtgcatagttaagatggaaaaggcgttcagtttgtggatggaatacatgaacagaaatggattttgattgatggcagctgggtttggtactctctgccgttccagtcagccactggtggtctgggggtgtatcacttgtgaataatggggggctgctgcatctcctttgaatgttgcctctgatgcctgaatgatgtaaggaaagtcccccagaccttggctcagtaaatgtagtcgtgtctcgtgaaatgatcttccctcatcatcaggccatctttgatgacccttgtgaaacgacgtctgtacaattctattggtttacaaaatatgcgtgtagacatattctgaagagattgcttgatcttaaattgggcttagaagcccaaaataggtgactattcttttttaaagtgtaacttaaaaaaatatttcattgacacatctatacaggcaaattggaaattgtaagtgcaaaccttgatctcacccctcctggcccgatctcacccctccccttggctcaccagagccctaacttctgtcactgcaggtttgcctgtttcagaacctcccatcaacggaagcagggagtaggcctcatttttggacttggatcctttccctcgttacgtctgtgagagccgcccgtgctgtcatgtgtggtgacaatctgatactctcattgctgtataaaatgtccctgtaccgccatctatctgtctgtgccaaggacggtagacgtacaggctcttttgaatttttagtcattctgcgtgatgctgctgtgaacatacttggtgcacgtctccgagtggctgtgtccactgacttatctccagcattcgccttggagtggcagggctgtgacctagccacggtaggccctgcagagtgtttctcaaagcgattgtatcatgtcacgtgccatcagcagtccatgaatgttctgtgtgcgtcatggtccctccagcaccggcgatggtcagtgtgtttaatttcagccattttgctgagcctacggtgtttcgtggacttggttttttctgctgcgtcaagatcctgggcatgactctacagccgtctggagtggcccaatagctgctttttatgaagtgttcatttgcgtcttccactcatgtttattgagttgctggtccttttgttaaataatttgcaggagctcttcctatatgctccattcaagcctgtgtttattctgtggctggccttcttatttgcttaatggtacattttgatgagcagaaattcttaatgttagctaagtcgaattgattcatcttttcccttccaggtcgtgtgttttgcattctgtgtgggaaacgtcatcttaccccaaagccgtgagacgttctctcgcgttcttgtcccagctttccagccttacatcacacagttgggtctaccagccgtttctgattaagttccatgtggtatgagatggatctcaaggcacattttttttctctgcacatggagacccgacagatccaacatcatttattgaaaagttctagcctttcactcataatggttttatgtaaagttctgaaacactttagagagacagaatggaagactgggtctcatccctgaatatattatatctaattagctaattatcttttatgtctcatccgctgaaagccggagctgagatcacacgcagattcctatctagcggcaggcgccctcccgagaacgctaacgaaccagggccctctctgttttccttttccctgggccgcctgcttgaacatcgcagggtgggattcgcagtggggaggtagatagctgctccccacctgcccccaacgcccccatcgcccccaccctgcatccagcctagccctggcctcctacccctcccatgggaacgaggggcctggcctggctccaggagggtggggactgggagaggtccccggcctggtggtctttctaatggcctgactggcagaagaggggcctggtgtgatactcagcattgcagaggccactgtgtgccctgggtccccagaggggagctgagctgaccctgcagatggtcggggaggttcaaatatgatcgcagccaggagtagttctggggccatgtcttcccctctgcactcagaggggaaatgccagctattatcccagccgagaaatgagccatggggcttgttctacagtgtctgatggccatggaggtgtttttgtctgtgacttcttaagttcgtacactttactttttttatagaaggtttaggtttacagaaagagagcaggaagcagagggtgtccacagctccctcccaccacaggacaccatcactggactctcttattggcaaggtccactggttacaattgatgagccaatactgaggcccatgaccaggcgttactgaggcccgtgaccaggcaatactgagacccgtgaccagtcagtacggaggcccgtgacctggtgatactgagtgaccagccagcatccacagtgtacactgccattccctcttggtgtggacatgtcatgggctttggtaaatatgcagtgccaggaatccccgtgacagcgtcacaccggctagttccactgccctgaaaccccttgtcggagcgggtttcacatgccccagctcctggggatggtgacatcagcaggcctccctccagcctgctgggagacacaggcaccgcatgtctgctgtgtgggctgtggggagcattccatccggagcccaggaggtagagggtggccgactgtctcagcctccttcatccccatggtgctgagtggttggagggaggaggagggactgagggagtgggcgtccagagagtcacccaagcaccccagctgcataggtgatttccagagaaatgtcacccagtcctgtctggggaagcccaaacagggacagcctgggattgagggggaggagggcaagtcgggtgagatccctacttggagaggtagcaccccgaccctcacccctcccagcatgcagcaggcccgtttctgcctggagcttttccaggggcagcacagggcagcagggatgaggtctgcccatccgagcggcctgcaggaggagcctggagcccgcccgccctccccagccagccccgcactgcatctaagagccacgcgctcctggcttgggtaccacctaacggtgtgatgatttacctgtctgttccctttcacccaggagaacagagcatatttcagggcaggaatcaggaggcagaccaggaggaagggaggaaagattggaaaacttctaataaaattccatttcctgaaatagccgtaactgtgatatcaatatatcaatatttgcagtcttatcggttctgacatgggtattgcgtgttagtgaacgtcttccacgtgagtgcccctcccgccttccgtgccacactcccctgttgatatttatttatctcgcgggcttcgctggaatcttgagggtccttgagactccgcactgcgttataactcctgcctggttaattcaatttctcttatattctgactcccctggcaaaaataatcggcttctggccaccagggccacagactttctgtcatgagcatgggtcttcaccgggagcgttaatcccccagcactcagggccgcgtcttcactgggagctgtaatcccccagcactcaggaccgcgtcttcaccgggagcgttaatcccccagcactcagggccgcgtcttcactgggagctgtaatcccccagcactcaggaccgcgtcttcactgggagctgtagtcccccagcactcaggaccgcgtcttcactgggagctgtaatcccccagcactcaggaccgcgtcttcactgggaactgtaatcccccagcactcagggccgcgtcttcactgggagctgtaatcccccagcactcaggaccgcgtcttcaccgggagcgttaatcccccagcactcagggccgcgtcttcactgggagctgtaatcccccagcactcaggaccgcgtcttcactgggagctgtagtcccccagcactcaggaccgcgtcttcactgggagctgtaatcccccagcactcaggaccgcgtcttcactgggaactgtaatcccccagcactcagggccgcgtcttcactgggagctgtaatcccccagcactcaggaccgcgtcttcactgggagtgttaatcccccagcactcagggccgcatcttcactgggagctgtagtcccccagcactcagggccgcgtcttcactgggagctgtaatcccccagcactcggggccgcgttttcactgggagctgtaatcccccagcactcagggccgcatcttcactgggagtgttaatcccccagcactcagggccgcgtcttcactgggagctgtagtcccccagcactcagggccgcatcttcactgggagtgttaatcccccagcactcagggccgcgtcttcactgggagctgtagtcccccagcactcagggccgcatcttcactgggagtgttaatcccccagcactcagggccgcgtcttcaccgggagctgtaatcccccagcactcggggccgcgttttcactggaaactgtagtcccccagcactcggggccgcgtcttcactgggagctgtagtcccccagcactcagggccacaggccgcgatcttgggaggacaccacctggctggcaccaggattaacttccctcctggtggaggctgctgcggggggtctcagcgtcagctctggtggattaatgaagatgaaagggcaggaccaagctgtctgaacgggcattgccatggtcccagtgctggcgacctccccagattcatgtgttgaaatcctcaccctcgaggtgatggtatttgggaggtgagtagctggtgagaggggagccctcaggaatgggattaatgtccttagaagagagaccctccccacttccccgacgtgaggacacaaccaggaggcaccgtctgtgaaccaggaagcccccgccagacaccgaatctgctgatgccttgatctcagactttccagtccctggaactgggagagagaaacccattgtgtctaagccccccagcgtgtggtctgttgtcttggcagcctgcgtacactaaggcaggcattgcttcatctccaaactctgaaaaaggagaaggtggctgcaggccccagcccatgagcttcgcctgcagggaaacccagaaacctatcaggcaaaaggagcccttggccccggggtagccccctttcaagcccagcccactgcgcccatgcagtccgtgaggacccacttctagaaggtcaggtgcccatgtctccgcctcagtagggctgcatcccaggcagatttgccagcctcgccatggtgaatgagtgaccctgaagtgccccacatgaccagggagcaccctgcctttgagtttccaaaattggatgcagcagggtccttggaataatgacgagaggatgccttctccatctgtcccaggtgtgagttggtggcatagcctttcctccctgagccagggggtcttaaatgaccgagtcaggctcctgggggcaaaggggccatgggaggagcccctgtgtcaggtaagacgtttgtcaccaggcccacctgcttcccagccccatgttgcccacttgcctgcaggaatgaaccatagcccagagacgtcagtgctttctggccctcgcatatgaaggctattgcaaagctgagattgtgattccacgtttcaccagccctaaggctgtgctgcctcccgcctgagctggcttctccattcagttagctggaaattgaaaattaaacaaactgtgacctctccgggtccccagtcctggctgttactgcccctcaactcccaagcagcttgtctcagccatccaagcctgcgaatccctcctgcggaaagaggaaggatgatgtcccagagccagatgttcagccctggcctcatgttaggcgcttagatcctctcagaggacagctctccgggctgtgcgtgtgcttaggggctggcccacactgcccctcattctgtaatcggctgctaatggccctgtgcgccttgggagtcagccctccttaatggtggtttttatggtaaataattgcagtattggataccattcctttatctaggccacgattcctctgaagaagtcattatgaattggcttacagggtttggaacgttctttttaatgaaggctcttgctggaccaaggcgcggaggacagaatgcttaagcacacgctggaaggccaggcctggtgggcactgggtaaacacacccatgccagccttttagaggctaagcccatggcgggctgtcagctcagactcaggagagctgccggctgggctcagccccactcccggccccgcactgaggctctagagagtgaaaatgggggcaatccatcggtggaggtgggggaagcaggagcagtagccgcgtggcctgggcagggtcgaacccaaggtcaaagctccttgcagcagagacaggatttaggagcggctggttaatgacccggcaattttgccgtctcatcaggatgtaggaaaatgctgggttgaggcattttgtcatggcctgaaggcgagaaagcacctcctcagttgtgtgagggcaattttacatgatggagaccatcaggagccgtggcttactttgaggcagctttatgggcctctggtgactctctgtacaataaataaggcagggaaacaccgttcccaaagcctgggacagttggtgctaacttatctgtttgaatggaaatcttaaaccttgttaagtcaaactgccattgctcattacccataaatttggaggccagagggaagcgtcacccacaggaatttattagaaaatgctagaggatcttttgtatcccagggacacaccaagatgggaggaatagactgtgccgtatgctcacactcttaaatcatgccttggatgttcaggttgcacagacatgcaggaaacctgtgccctccgtgtccttagcttccggctgagttctcaccctgctaagcttccccaggagctcgagccattcggggaaacagccaggaggaccagaatgagcaggtctgagccgtgagtcctcctcaatgtgcagggagcaccgaacggagccaagttgcccctggcctggaagccccaccagccctttcacctgtctttctctgctcagggcatttctgacatctggggtgctctgttgagaatcacagaaattctcagccgaaagtggtgctggcttgctgaggcaggcagcctggggtacgttccactctctgtggaaaagtcagagtgctccctgctttcttcatcggtgctcatcccaaccaagccatccagagtggtggttccttcagaggcttgtgttctgggagcatgactgttgggatggaacagtgtctggagaggaacctgccatcccagtcagcgagcctgagtttaaaccagacatgaacagacacatttatcagagaatcccctggcctcccagggcctaatgagaccttcagggcacctccagtcctggaaacacaagcaaacagtggcccctctctgaaaacagctcccttctgtggctgtccctggtgcctgtccctggagagtctctcaactgtgactcagaaatcagctccctgatgtgtgaccaggcccaggattgcaggcaaagagagaaggtgcatgtttccgagacccaaacaatatctgatgagtggggagtaagcccgggctgtgaaactgcatccttggggtccagatcttgggtcttgtacatagtagctatgtgtctttgaagcaatccctgaacctctccaagtctcagttttctggtttgtaaagggtgtttgtaacactgcttcagggatcagagatgatttctgtaagtgattgagataatttcattatatttaccaagctcagctgatattgagagattttcatctcgaagtttccttctctgaactctgagtgtcaacagcctttgttcttggcttggtttttggactcctgattgttaagccttagccgatggactctggggaagttggtttgtgggaatcatcatacttctgctgcttgcatctgcgtgcaatacaacagtccacttcaattatcttcacaactagcatccaacatttaatgtttatggtagagaatttggacagtagagaaaattgtagcctaaagaagaaaatggaaatagttcttttattgccctaaggaaacttctattagcttttttgaacgtatccattttccttacatttatcaggggaaaaaaaatgggtgagattgaagaagttgccgcatatcagataagcatttcctcaaagcatgatttgttgtgtgtgataccgtggctgggtatagaattacagcacaaacagattttcttttggagctttgaagacatcacttccttgccttctcccagcctacatgatggctgtgtgatacctcactcctttgctcatcacccctcaggaacccatgcaccatccttttgaccttttgattctgatgcatcattgcatgacatctaggtatgttgacacctttgggcactttgcatgggaagttcagatttagctcagggaattttatgtatctgtgattatttcttttcctccattgtctttatttcccttgggactctgatcagagcaattattctccattggaaatagaacctcaacacccagacacgtgctggtggttttcatcactataaagaccacggtcctaatggcatttggtgctcagagccctggatgccgagtcctgagtatgtccaggacagtgtggaacagacaaaaaccctgaccccaaggctgatggcacaccccgctaaggaatgctgcaccagtgcctccaaatctccagcttcttcttttacatacttgtctccttttcatctggggcactgtgctctagaagatatcggtctcgttgttcaagttctgaggaaggtcccctccatcaccgtcatcttctcctccagcaaccccactttgaactttgggggaactcttgctttctgaagcagtctgctctggtttgatgtggcaccatccttgtggatctctgcagatgttttttgaaaaagattaaacagagtttctgcctctgtgtgtctctgcttcctctggggtcagttttcagctcgctcctctctgtgcctctgcttcctgctgtcagtttccctcccaggcagtcctgcctgtctcgtcgctttctggacaacagaggattaggcctgtaagcctgggagggtggctgggaccctctgcctctgcagcaggcttctctcctaagttgggggaatggctgttgggctctgctggccaggaagaggccggccttcttctgagggtgggatggctggtgccctgtcgctgctggactgagaggctctgggtgttccagggtggactgcctggctgtgtactgtgtgtagggcttggatgtcaaatggatcatttgaggcttggaataaaacagagcacaggctgacctcagccccgggtatgtaggaggtgagggagggtggaaggtgaaggtgcatggggccaggttatttttggctctgatgtccactctgtggagctgtggtccacacagagacaccgcctgctgacctgtcctgccaacccacaggttctttacaggcccttcccctaactctgcctgggaaatgcatcatagctgggtatagctctgtagatactaggggtgggagggctggccccggctctggggtcgggtgtctagtgagggcccgttctgccccagccctttgcccacctcacatctggactttttgcccgcctcacatctggactcctcttcgcccgcctcacatctggactcctctgcccgcctcacatctggactcctcttcgcccatctcacatctagactctgtgggatgttgcaggaattgccctccgcccttcctcctgcttgggccgggcggtgcagatgtaggtcccggtttcatcttctctcatttcttgggactttgctcccggctgcaggcacccttctagcagttagttacagtgagacggtatgtcacatttgggcctccggcattgctcgcccccacctgccccagccagaactcggggctccccagggcagggcttttgttccgccagcggttcctttctggcacccgtccatgcctgtccatggtttggctgtgtggactgttgtgttcacacatcccaggatctgctcttcctgcctctggaacgggctttatctgagtgacctttcaggtacgtccctcctcagccttcgagttacagtttgcacaacggtgatctcggtgttattgattgaatcgcgtcatttgcaaaccacgcttttgtttgggcgtcgacattggggctgatccatgttagtgcagttagacgctgcatctgggccctagtgactgcctgtcccggaacaacacgtcacaaaggcagggacagtgggaggtccacaccccccacagaaggagccctcgttcagggagacgccgtggggaggggggccaccttagcttgcccgttgggtctgcagtgtgatgggagatttgcagcattagcagtacctataagaacaagcctggcccgatgcacagttttatcgggacactgtcacactattctttcggtgttgctgtggctgctttgtgtcacagtgacagagacgaggctgagatagagactgcgtagccacagaggccaaacgatttgctgtctggccagtttttttttttttttgagatggagtctcgctctgtcacccaggcttggagtgcagtggcgcgatctcggctcactgcaccctccgcctcctgggttcaagagattctcctgccttagcctcccgagtagctgggattacaggtgcccatcaccacacacggctaatttttgtatttttagtagagatggggtttcaccctgttggccaggctggtctcgaactcctgacgtcaggtgatccacccacctcggcctccgaagctctgtggccttttaagaaaaagtttgccaatgacctgccatcagagttcattttgtttacgtaaagatcaacatgggtattgccaagtggcagagatgcaggactcaggaggcttcctgtggcggggcccccgtccaaaactctgggcctcagaggttgcagcgggagacagagcaggggatgcagagcagccttcagggatcagcctggaaagggcatctctgctgccctcagcaaagcagcccggcccatacacccacttgtgggatcctgggaggcatattcctgttatcagggcagcaaaaggggaaataggctggagaagctttgcccagacaagtggaccccccaccagctgggcatctcagcaggacagtcctggtggcggccgttttcaacaccaagcttggagaagacctaggaggcatgtgccgaggttgctctgacaccactgggtgcaaaagcccggcttccctctgcagtctccaagcatctgtcctggctcttccttcacagctgccggggagccccgcctgctggctgaggcctgaggcctcctgctctcttattcttcaagacccaccctgtcctccccagtctccaggtcagcattgtaccattgcacacaggagtgcagccctgaagcctgaaggccctgcaggtggctcatcccagacccactgccctgtgcatcacagcgcaccctgacgcccaggcacaggtgcctcatttgccctcattcaggagcagagagttggcgcccaccactggcaagcaggtgctgcctccagaaggctgctgaggcagctggcggtggggcaggcagtgggccttggctggaccatttgaggcttggaataaaacacagagcacaggctgatctcagcccccagagggctcacaggcagcctccctgggccacagcagccagcctcaaagatccagccgtgtccccagcctgcccagtcaaaggaaccagagtgttctgggagggcagagagcctggacagcgtccacctcatggtcttggcctgtccctcccacctggggtccaggttccatctggaatttgggagtggccacaggtgggaggacaccttctgggtctgggccaggtgagcctttgagggagggtggacgttgtcccgggagaaaggggccagcagacatgcctcttagggtgtggggcaggcaagcaaaggaggcattggagggaggcgggcctcatccctgctttgtctttcctgtggctcccgctcagaggcgcagggggaacagccatcaccactgtgggtgattctcccaggtatgcctggtggtcgttcaggagtctacacggctcccactctccaagcctgtgtgatgtccagttcttttgtcccagccatgcctgcaaatggccccccacgaggaaggacacaggactgcaacccagttctgcaggctgagatagctggagccaccctctccccagccagtgtggactagccagtgtggactctgcggccggggagcgggtatgcactgctcatggcttggactctgatacaacaagccctgctcaagtcctggtttctccactcccaagccattgaccttgaggaggtcaactgatttctctaagtttcttcctggaagtgggatgctccttggactaacctccctggacattgcaagtgtgaagtgattagagggttcccaggatggtctggttagggtgggggtcacctttttgagctgtcattaccactgggctcccaggggcagccctgggtaggcctctgccctgcagaagactctgctctctcgtggaggacgcccctgcctggcattcggctggaagccacttctgaccaccccagagccacccatataaatctgtattaagacacaattatcttggacattctctcctgcccactggacagaaagctgtttccggcacaggccagctgctgtgaatacagctgccttctgagtgcccgtcggggatgctgatgggctgaaacaattttattttcctgctgtcagggcaggatctgctcgtggctcccccataggcctggggagcaggaccctgcccgcccgctgtgctcccgacacctttggtcatcacgccttggctcggacgtcggtttcagatgtgcagttctggggatggggatgccggggtcggtggaggcagctcagggtggccgggccacgcgattgcagaagggacatgtatccaggctgtagtgaccttcccgtgttcttgagggactgctccccggcaagtcttcatctccagcaagactgaccagaggggccaatcagctggccaggaatagacccagcagcaacgtgggacagcccagacctggctttctgcctgctgcctccctcctgggcccatctgcctgagtttggagtccaggctgggtcttctcctccccgaggcctcccacccctgagcgccaaggcccagaggaagcagctcctggttggaagtttgcaggaggaacttgaggaagaaactgaagaaaaagtgagtctccctcacaaggagagtcaggtcgggcgggcgtggcgtccccctcctggatgacaggccacccaagcacagctacaggcagctgtcctggcccctggggagggatagaggagtcctgcagtggccctgccatgttgctccaacactgtggaggtccaagctggaggcagccctgcctgatctggcatcctcacccccagaccttccagtcccccaggcctccctagaccccgagagctcactccccagagctccccattcctgcatcccaaaccttccaggcccctggggctccctatccccgcccccgttgctctgtctgatgtcagcagctccctgactctgacccttgccattccagttccctggtcctcctgagccgcctccctcaaacctctttcctgaattctctttcctggggcggctgctctgggccccatgttccctctgctgagggcttctgaggcttctctttcctgttcccttaagctgggctataagggcccccagggaggggctctctcccgccggctctgtgcagctgatgttctggggatcctgctgtgccccgggctccacacctggatgcagtggtacaggcagccagccgagccaccctcggagaactgaccctatgcggggcaaagacacaggcctcaaatccatccatgtgtctcagggccctgtgcagaggaaccaggaagaggtcgggcaccaggcgagaatgctgaggcctgtggtccagggaagggcttcaaacaggtccttggagggacatgagttctggatgagcctggagagctggagcaggaagaggtcggggagccgcgtgtgtgacctaagcagggctgcggcaggcggggccagggctgcaggtggtgcggcctctgtcccacacgtggaaaagtgtcctcagcccacccacaggacggaagccctgcgctcaaggaaggatgctggagatagacgtcacaggaaaacgcatgatggaaacttctaaaaagaaaacggaaaaacaaagttaaaaaaaaaaaatgctggtgtgtacatttgtgtatttcaaagacctcagggtgtaaggacagaagaaacttctcacatgttggaagcctgtctctgagttccggtgccagggcaccgtcccggctccctgtccatccctctcccggctccccggctccccagctccccgtccatccgtctcccagctctgcgtccatccctctcccgtctccccgtccatccctctcccggctccccgtccatccctctcccggctccgcgtccatccctctcctggttccccagctccccctccatccctctcccgtctccctgtccatccctctcctggtccctgtccatccctctcctggctccccagctcaccgtccatccctctcccgtctctctgtccatccctctcccggctccccgtccatccctctcccggctccctgtccatccctctcccggctccctgtccatccctctcccggctcggcgtccatccctctcccggctccctgtccatccctctcccggctccccgtccatccctctcctggctccccagctccccgtccatccctctcccggctccccatccatccctcttccggctccccgtccatccctctccgggctccccgtccatccctctcccggctccccgtccatccctctccgggctccccgtccatccctctccgggctccccgtccatccctctcccggctccccgtccatccctctccgggctccccgtccatccctctccgggctccccgtccatccctctcccggctccccgtccatccctctccgggctccccgtccatccctctcccggctccccgtccatccctctccgggctccccgtccatccctctcccggctccccgtccatccctctccgggctccccgtccatccctctccgggctccccgtccatccctctcccggctccccgtccatccctctccgggctccccgtccatccctctcccgtctccccgtccatccctctcccgtctccccgtccatccctctcccggctccccgtccatccctctcctggctccccagctccccgtccatccctctcccggctccctgtccatccctctcctggtgtggctgaagatgtgttgttccatgaagcgccgccctcaccgtgtggaccggccctgcccaagcactctcagggttctgcacaggccaggcagcttagcccagtggtgaccaagtccacccccagctctgtcccttcctttaggatggcctagggcggaccccatgaacctcagttttcccacttgtaaatgttatcccagcatcacccccaggagtcacagaggcctcgtgaggctgcagagggcccggttcaaccggcacccacccgtggtctcactgcagctgctgcagccccggtgggtgtggatgggtggccatggtccccccaccctgtgtgcaaggaggatatcatgtctgaggctgaaaccacctgctcaccccagaccccaggccctggctccggcctgtcttctttgctggaagcagagttataaataacttccaatttggggctctgtggggctggcaggagcgtgtgcgtcccacgacccaggttgctgccagcttttgctgggttctcagaacaaaagatggaagatctcgaggagactttagtgcacagcctcctgctgtacccgccatgcagttgcctgcccagtccctgctgccggggccctgtggcatttagtctccattcaagtccaggtagccccacagcaggagagaagggcgagggggctaagaggtgacggcagcacactgagaggggccaccaagaaagggaagtgggcacccacaaacacagaggatggggaggcaggaggagctgagggaccccagcactgctgctgcccctggacagggcagcctcccaaaatttgcccaccacgactgggcactgacagccagtgtgccaggccccttgtgcatgccaggtctctagggcagaggaggactgaggatgtggtcctcaccgtgggaggtcctggtccagtgaaagaggatccagatgtcctggctcttcccactgcagccgccttgggagcacagtgctgcagacacctgcacctgtgcctgcttcactcccactgtgccaccgtccagtgctgggccgggcacaccaagctgtgtcggctctcatcttagggcgcccgggtggcaagaactggggagcatggagaaaagggcccccaggcccaacctgcgctcccaccacggcttctggaaggatcctaatctggctcaggctcgctggaaacctcagacatgttgcctaaattctgagcatccattttgttctccggggccctacctgtcagattcagtggattgctcagaatattagtggatcctggaagacatcgtggtgcagcatgcagcactcggaggcagggcctgagccacgcttatccctgagcacatcatgctcagagttgtagggagaggcagcccctgcccatcgcagctgtaaccaaggaaagcacatccaaatgcctggaaccgagtttccccccaattaggagaagcacagaaaatgaggggctccaacccgtgaggacacgcacagctcagcagtagagacgctctcctcatttcaaattgtttaaaaaccagagatgaggccgggtgcggtggctcacacctgtaatcctagcactttgggaggctgaggcgggtggattgcctgagctcaggagttcaggaccagcctggggaacacggtgaaaccctgtctctactaaaaaaatacaaaaaaaaaaaaaaattaggcgtgggggtaggtgcctgtaatcccagctacttgggaggctgaggcaggagaattgcttgaacctgggaggtggaggttgcagtgagccgagattgtgccactgcactccagcctgggtgacagagcaagactccatctccaaaaaaaaaaaaaaagaaaagaaaaaagaaaaaaacagaggcaagaagtttccaagagaggcgctttccctgattctcagacagaacacacgtgtagttatttagttgagttagaagatggggtctgtccttcttgcacacactccggatcctggggtgttgtccacatgtagactctcccactcctgcttgatcaaacaccagcaccccgtcgttgggggctggacattgaggggaaatggccttaggttctcgcacagatccgtccactgtcctaggagctgtggagtctttgcgagggtacgggagctccccgtcaagcagacgttgttgtggactcactggagactcggggcctcccagggcctgaggctgcggctccccaaggccgtcctcagcttcccatcgatcccattcgtggagcacagtgggtgtttgatgacaaatcacaacttctgcacccctgtggatgtgttcagaggatccagaactctgtcctcctgctccaggttgtggccagcagtctgggctccctagaccagcagctggcaggaatgccagccctgccactctccagcctcaggaatgacctgaccttagaacccagggcttctccaggtgtcccctagagccgtgatgatgaggggatgaaatggcagatggcacctgggtgagacccccacacccaaggggctgcagatgaaggggttggggcagaaggggtacaggtggctttgggaacatctgcccctccacccagagccccctgaagttgctagtgatgttgatacatatcatcgtgagcttctgtcccctggtgaccccacgtcccacaggaccaggctgaggctgaaaagaggtcttcttgacatccttaccagcggttggtcaactgtcccacaagttggtgaaagcagaagaccctgacgtcatttgcatataacccagaagcacagtcattgtcactgtattgacaaaaccctgacagcatttgcatattacccagaagcacagtcattgtcgctgtattgacaaaagcctgacggcatttgcatattacccagaagcacagtcattgtcgctgaattgacgtgtgtctggatgaggcctttgctttgcgggtgatctgtggcttggtgctttcgtcggtttttttttgtgcgtgtgtttatttctaaagccaggctcctagttatacttgatgatttcaaggttgtgtttcattacagtgtggcaggaaggcttgacacgcgtggagtcccctggcagtttttgacttttgatttccgtctctccccttgtcttgaccacacctaaattcacagcagattgttttttagaaatgtactctattgcatctttcggtaatattcagctagtgttcatggaaacagctccttgcttgctttccacacttaccttccgttgacttatttaattctacttaagttatacagtcccggtggcaataccagctacagggtcacagccaggtttcggaatagacacggctctcttggtaaacgcacacacacagacacacacacactcggggcacagtgatgcaggagtgacctcggacaggcccggatgttcctcccacgtaataaagactttcttcaaaggcattacacacagacgagagtgctggttaatagcttaacgccataagctaattagctgggggccggtggtgagagagcgccaggtacggcacttgctgggcactgtgccctttcatcagcctaacagcccagtgctcagttgccactcctctcacctattttgcttttagaaggtgctgtttgcacccttctcttcagatgaggccaagaggctctcttggccaaagtgagtttacctgaagggacgggctgaggccagagccaggtcgttgggccacagaccgtgcactcgctggttcctccacggctcaggaacagcctcccactgccaggacagcctaggaggctgggccagcaccttcattcagttcaacgctttctatcacagaactgttttgaaaaaattgcaaactttcaaacttgtcattggcaatacggtttggctctgtgttcacacccaaatctcatgttgaattgtaatccccacatgtcgagggagagagctggcaggaggtgattggatcatgggcgcggttttccccatgctgttctcatgacagtgagtgagttctcacgagatctgatggcttaaaagtgtagcccctcccccgttgccggctctccctcctgcctccatgtgagacgtgcctgcttcccctttgccttctgccatgattgtaagtttcctctgtggcctccccagccatgaggaactgtgagtcagttaaacttttttttctttataaattacccagtctcaggtagttattcatagcagtttgaaaactgaccagtgcaatcagttttatgattttcccaaggccccgagtctccttaccatggagtgagccgttacctgaattccaggcaatggtattttcttgggaggggagtgagcgttcggaagcagaagtgcgtggggatggcttggctctgccgtccctcagcccttcctgtctcctgtgggatcaggggtttgctcacaggacggtgatctttggaggctttgtggggtagagggagggcactgtgttgagaggcacttggaagtaggcagaattgagcccaggaggagaggaggcagccgtgaagcgtgattggccttcccagggaagggcgatggagtgactcagaactcccagcagctgtcccataaagcctccacatctcatgatgtgacctaaccatggtctagaagtacagtgacccttcccgttcacgaggctggacacccaggactcaggtaggaacaaggttgatgctgcctccagagcagaccagccgcaattcagtcactgtgtgcactgtgtcaccctggtaagcaccttggcccctttcagattctccaggcctccccacactcctgcccgcttcccaggatctttgaggttgtcagctgggacaggcaagtgcccaaggcactaaacaaagactgaggctgtgtctgggtaaaatcccccaagagcggctgagaactccaattccttggaaatacaaaggtttccatgtttcatggtgaccccagggcccgacctgctcacacgctgtgcccggcacttacctctcggggtgcggctcccagaggagcttcccagagcttccctgctgataggctgtgttgaccaagaagccaaactctgtaaaatatttaaggaggtttattctccgccagtgaccatggccttgggtgatagtctcaggaagaccacgtgtgcctgagttgggttatagttggttttatacattttagggacacagaagttacaggcaaaggcataagtcagtgcacttaagatgtacgttggtttggcctgggaaaggggagatctccaaggtgggggcttccaggtcataggtggattcagagatttcctgattggcaattggttgaaagagttaagctttgtctaaagacttcagaagtcagtaaaaaggaatgctggagttaaaatgggaggttatggaagccacagttcttattatgtagatgaatcctgtaagcagcaggcttcagagagaatgaatgtctctcctaggaccttaaaaggtgtcagactcttagtgaaatctctcttggatccaggaaagacctagaaaaaggagatgcaaattttcctcacaagagacggctttgcagagccatttcaaaatatgtcagagaaatgttctttggggtaaaatattttgatttcctttagagcctgctatgtgtcatgtgatgctgcaccagagtcaggttggaatttggtatcttattgccacaaattatccatgttgtcagtcttatgatctctcttttaatgatactgctggtcagtggggcctaaactccaaaagggagggggcgtattgaggggtgtctaatctcccatcccatcatggttgggaattcagtttgtcagatttctctgggctctccttggcctatgggggtgtctgttcagttggctggggggcttagggtttcattttgggtttacagctctctgccagttagaaaacaccccattcagagtcctttgcatgtacacctgttgccggctgcatccatcaccactggtcatccttccttgtggttccagaagctaagaggagggcagggcctggaaatgcagatgccttcccttagtacacacaggccccacgtgcgccccgggagtacacacaggccccacgtgcgccccgggagtacacgcaggccccacgtgcgccccgggagtacacgcaggccccacgtgtgccccgggagtacatgcaggccccacgtgtgccccgggagttggaaggggtgctgagtggggtcagcacaggtggccaaggtcactcccacttctttcaaagctccttccagcgggcaggtggaggagttccttgaactgtgggcagcaggcagtatggcgtctgaggccgccaggggtctctgcccaggaggggaaaggagacaagcctaggtttcactgtgcctttgtctgctatggctgctataatggagtgcatagacagaaatttgtttctcacagctctggaggctggaaatctacgatcatggtgccagtagggtcgggttctggtgagcactctcttctggtttgcagacaactgtcttctggctgtgtcctcacatactggaaaggatgaggggcctctctcaggtcctttttgtaagggcactaatttcactcatgagggctccactcttatggcctaatcactgcccaaaggccccacttcctaataccatcacttggggtttagatctaaacatcataattgcaggggggcacagaagttcaaaccatagaacgtgatgctcaggtgtttggatgtttgggtgagtggatgggagaaagaatggatggatggatggacaggtggattgatggatggtgggtagatgaatggatagattgatagaaagtggataggttgatggatgcttgaatggatggatggatggtgaatcgatttttgaatggatagatgggtaggggatggatggatggatggatggtagacaagtggatggatggatggattggaggaaggatggactgattgatggatggatggatggactaatggatggatggatagatggagatgatggatggattgatggttgaatggatggatggatggatggatggatggatggatggatggattggtggagggtgggtgatgaatgagtgaattgatggatgggaggatagatgatggatggttggatggtggacaagtggatggatggatggattgatggaggatggatagatggatgaatggattgatgaatgggtggatggatggatggatagatggtgatggtggatggatgtttgaatggataggtggatagataggtggatggatggattggtggagggtgggtgatggatgagtggattgatggatgggaggatgggtgggtggtgtatggtggatggattgagtggatagatagatggataggtggatggatgggtgggtggatgaatggatggtggacggatggatgggtggatgggtgggtggatgaatggatggtggacaggtggatggatggattagtgggtgatggatggatggtggatgatgcatggatggtaatggatgtttgaatggatagatagatgggtgggtagatagatggatggattggtggcaggggtgggggggcatctgtggatgggtggatgggggatggctaaatatttcctgaacctaactatgaagccttctgtgagccttgatggatccaggtcctagtgagggcaccaggttccctgagaaggcagtcagagttctcagcctccgtgttaattttgccatggcgagtgcctccccttgaggcagtgacattccacttgtaaacaggaccatccctgggaactctcccctcctcactctcccagtgacagatccacaaccaacagcacccagctccatacacaccctgctggcctcaggtcacctccctaagtgccccacctctgaggggggaacatgtagctgcccccacataccacgacccaccttccctgggctgccccaggctccctgagtgcggctccaccagcacttagcgcctgggacctcctggaaccagacaggagacactttcctttttggacattaaaattaaaaactgcggctgcctctcctgtcttctctcttaaatagcttctgtcagttcgtaggaatttgcctgaggaacatgattagagggtttttttttttcttccacttacatgtcttaatgaaataatgaaacaggtagcttattacagttggggttttttattgtttttttgtgtgttttggggtttttttttccctctctctcatctaatttgatgacccagacttggagggttttgcactggcgcacccttcataaagggaggcgtttccattcttgagcgtgatggggacagttcctggagctaatgaatcactctaatcagagagccatcttgaaaattaatacattctactgtaactatttaaagaaaaaataattatcaagactgttcccactaaattatgctgtctagaagttgtagaaagaaaattttatctaattttaagatgtaatctgggttttgcagatttttcttttttgagtgattaacagatcagcactgaatagcaaggaccagagcacgctgcccttttctcagtgttctcctggagtcttgtcttgtgtcagcctcatgcaccccaaggccttggccctgtcttggctcctgccccctgagggccagatcttcaggcctcttaactccccctggctgctcgggggacggtggctttccctggccggctcctccctgggttcatttctaagtaagctccttgcttagctgaaaggagagtcttgacttcccagtttctgagaaacagtgtgtcctgatttaacaaaaaaagagggctgggcacagtggctcatgcctataatctcagcactttgggaggccaaggctggcggatcacctgaggtcaggagttcgagatcagcctgaccaacattgtgaaaccccatctctactaaaaatataaaaaactagccaggtgtggtggcgcatgcctgtaatcctagctacttgggagcctgaggcaggagaatcacttgaacctgggaggtggaggttgcagtgagccaaaatcgcaccactgcactccagcctgggtgacagagcaagacttgtctcggaaaaaaaaaaaaaaaaaaagagagagaaaacctttgttgatgtgctgcagtttaactgctaagcacaacatgaaatggcctatgtatgtccttggtgtgggtccctccagcctctgcacctgcctcccaggaggaccccgtactcacagaagtcttcagctgcaaatgtgcaagatggctagagcagttagggaggcgcggttttcaaaaacgcgtggaacccttcctctggtctgcacgccgtatgcagcggggagtgtggagcagatggacgtagacacgttaccgggtctgacccccaccccagagatggggcgcctctcacccacctgcaaaccccacatctcgggtccacatctggagcacccccgtctgccttgtcctcaggctctgagttctgagagggatttagcgattccctgacttgggacacgttcaccccagaaaaggccagcctgtaccctcagacccagggccagaagcacagggtcgggttctgacgcctgaggaacctgcgcagacttgagagcaagtcctctgggtggagacaaagtggtgacgtgagatgttgctcaatcttgaggccctgctgctttaccgagtctgagccgatgttattcactggctctcagtttggggtcctaggtcacccgtgtagcccctcgggcggacagactggcctgtcccccacccactcaccccagctccctgggccagcccagctgtgctttcatggggctggggccagactgtgcaggaaagagcaggttgatgggctggtatcattggcataacaggtgaggggggccacagccttgggccttccttgcaccaccctctttcctgtccccggttggtgtaagtgtctctgagcctggctgggtgcttccctcagtcactagcaaggtccttgctgcccccaggagccagtccctccaggatgagggatacggcaagggagcgctccctgtacaccgctctgccttgcaacctcttccctggtggcctggcgtccatcacaggtggcctcacagcactgggggaggtgggcttggctggggtcagtggatgtggagatgtccaccctgccctgtggcatcagctggaggccaggggcctgtgctccccccacccctcctgcatggaaagatgctcataactgcatttgtcctcagcctgccaggcaaggggacggggctcccagcgggttcctggatgtgacccttctcccaccccatctccttgtgttcacacaatgaccccttggcccaggtggtaactgtgtgctggagacccacagagaaccaccttgagtggactccacattccagaaagtgggtctgggtgtgataggcaggtgtgagggccggggctatggaggactgtggctctttgggacgtgtatcagccacacagccgtaccagggcctgtgtgcccagtgtgcagcctccaccctactggcctctccagcccctccatgcttgtagcgagatcccaggtgctggccctcccacaggcttacagtgatgaccagcccatcgccagggccagggcccctgcatcctcctgcaggcccttcctgcctgctgtgctgtcaccctcttatctttgtgggcaattcaccctttaaacctcatctcttctagggagccctcctggctgccctgtggactccctctctgtagtgtagcatcttggactgatgtaatcagagctcttggggacaggcctgtgtccctcaagctggacgtgacctgaggcacacggaaagtacagccccaatgagtggccttggcctctgcccaggaggctgtgggctgacctatgtcagcccaggcttggggggccgtgctgcccccgccccctgtcttctatgatgagttgatccaggcacagagctgcctgtcgtggagggaggacgcctcgcctcctgagcttaccccacatctggatggggtccagagagcgcccacagcatctgcctggaagcagctaggtgagcatcaggaagatgcttgaccctcctgagcgccgtcaatctccagtggtcaaggagacccgccgtaaagcaggaagcacgaagccagtccctgaggccgcagcggccggtgaagtccctccatacctgaggctcccaggcaagcctcagggcggcccggggaccattggtggtcaggggctgtgggcttcctaagctcaagctggctcgggtgcgaggtgcaggggccacttctgggccccttcccttgtttgccaagtagggagccgcctcctctcgtggctgtaagggtctgatggaaggatgggcggggccgtctttccaaagccctgggactgctgctgatgcagattttacttcacgtttgacatttttggtatcgtcatcctcccggtctttactgagtaacaaaaccagcaaggcctaagagggaagatggagacgtggccaggacagggtcgccttgtgtcgggcaccaggaccgcaggtgaggaggcaaactgggttcgcctgtgtgctgagcacccagggcagatgcagcctcgcgaggaacgcagcctggagaggctcacagtcgcagtggcatggctgggcaacggaggacgcgccaggagcaggctcttcttctgcccctgctgcaggcgctcagtcctgccataatctgggaggtgacctctgcttttccccacctgtggaccctacggggcgcctgccccttggcaggtctgctcaggaggaaggccaggtgtctggctctctgtgctgggcacatccggggagggccccaggcggctgacgttgagtctcgtgggatggcgaggtgctgcctgtggagactcgggccccaactgtctgggccctcccaggtgtgcttgttggctcccaactgcttccaggaggtccctgtcacgggatccatcctgagacagccccccttggatggactgagctgacactaggtgccctggagggctgagtcgtcctccaaaggggcctgtgccaccagctcctagggcaggaacactgggtgcctccttcctgtccccaatcagagaggccctggtttactcctccctgaacctgggatggggcagtgtgccagggggaggaggctagggtcttcctgggaagacaccgagacctgagccctggcccacccaggagaccctcccttccttcagcaatggcctgtggcctgagagctgcctccagcctgcaggatgtcagacagtgagaccctcagagtgcagggagggctgcagtaggtcagcaaatggggctgctgagagtcaggggtccgctgcagccctgggcccctccctccttgctgtcaggcttaatcaaggcagctgggactgtgctcatgggaaaggcaagaagcatattttgggaccattagaggcaattttgtttacctgatttattttaatttacttaattgatttaattttttaagagactgagtctcgccgtgttgcccaggctggtctcaaactcttgggttcaagtgatcctcctgcctggacctccccaattgctgggatcacaggcctgagccaccatgcctgcccttacctggtttttgaaagaggattcagtcatagcctgacagtctgatgaaggttaaggatatgaaatgaatcccataaatgatgatggcagtggcagcagggcacagcagtgctgtaggatggggaactccgcagagctctccagcatgtggagtagtatttaaaacgcatacgtatctagacagcctcgtgacggtgtgcaggtggccatacgaggggcgtgttcccaggaaggtcagaatgggaagcagccgtgtgtcctcagtcaccgacctcaggccccgttgggcccaggccaggaacagcccagagcttgcttgggacctcaggagcccctcccaggccacctcagggatggggcaccgttgaggcaggaagggcatcggcggcgccttgggccccgtcatcttgagaacagtgtaagaactccgcgagcccgtgctcactattcacagaactcagcagaactcagcagcgtgtttgtcaagggcacttactcaggcccaaggccgttggaacgctgcccttcgaccctgtccgcccactcggattcccagtagctgagcgcaggacgtgacctcgagtcgaagcctctgctggaaaatacgtccttgtctgcctggaggggcctcagtgacggggcctcactcgtcctcagagcagcctggcaggatgagtccagagccatgaaaatgctcagaccttttcatcccataattctgctcccagaaatttgccctaagagagtaattgaaaggaagagggaaaaaccaggaaagcacaaacacccgaaatgtaccaccaccgggaatggccaggtgagtcggagatccgtgcgcgtcatagtgcagcccgtgcaggcagtaaaggagggactgcgactcttgcagatggctgtgactcaaccatgggtagatgaggaagcatagcctgaggtcccagaggagaccagcaggtgaggcccgcaggaggggcggctgggcctggagctcagggaactctgttcccacccctggtccggctctgggccttggtcctgttttctgccttcgtcccgtcctgccccgggccttattcctgctctctctctgtctcagtcccgcaccacaccgggctttggtcctgctccaggcctcattcctactctctctcagtcctgctccgggccttggtttctgagggcctcccccaaccctccagcctaccctgggctttgcatcttccaggccacaatcctgacccagctgtggggtgtggtcagccatggccacctatacccatcttactgactatgccatctcagatggacgcagctgacagatggtgccccgggtgtttccgccgggtggggaaactgtggggtcccctgctccagaatgccaccctcctgtcttctgtagacgattcagcatctccactgggctgtcggcttctcctctttcttcaggaagcccgtgggcccctctgaggtccctgcccacaggccacgcggaggctgactgcatccatgttccagcatcaccgcttgtaagccgtgtgaccttgggcagacttcttgagctctctgagcttctgtgtcctcttctgtaatgtgaagatgaagctaattgattccccataggtagaaatcaataataaaattccagtaataaatgagcataccagtccctgggaggaccagcagggcggccctgacagtcggcagctgtccaagggccccaacgctcagaaagctggggaaaggggtggtcaacattaatacacacaaatacgtagaaatgactgtgtggcatagccccagggaaggctggcactgctgggacaccctgcgcgtttcctggtgtgtctgggctctgacgtttcgagtggggcccttccggagtgcaggaggctcttctggaggtgtgggacagagactcctcccagaaacacgggcgcttcccagccagtgctctgggcctgtttgccttttcctgagccctgagcccaggaagcccggctgtgtccgctcaccccaaaagcctcctccctgccccatgtgctggtcacaagtcaccaagcctgtgggtatctggtactgctcccgggcagtgcctcatctgatgttctctgtgtccccgggccacagtgccctggcaagggctgacctacagggggaggctgcctgtgagcagctccaagaccaccaagggctgcccaccgctcagacctcctcccccaccccccaccgctccagacctccgcccccacccgccgccgctccgacctccgcccccaccccccgccgctccagacttccacccccacctgcctgtgagccttcctgccccaggctgggaccactggggaggtcaggcctcaaagtgctgcctcccatcgggcagaaacgggagccctgagccctcctgtgagcttcaaacgtgccctgcagagatggtttcacagtgaccgtcctcagtgcctgtgtcaggacttactgcctgtgggttcttctgtggtacctctgagataccccatttccatttgacttcgtgaggccaggtggtgtgtgtgtctttgtgtgtctgcattgagtgcttgtgcatttgtgtatgtgtgcacattgtgtgtgtgtgtgtgatttgtatgtatttgtctgtattaacgttgcccactccttttcccatgctgttgattgaatcctccatcaccagccagatctgggagactcgagggacactcttctgggtgagacactgccagggagagcagcctccccagctcagacagctgagatgtgtttctgacgatatctgagtaaatgcccaaagatttctcctggaatctcactggttttgttctggatgattcatttttccaagctgttgagtacagcaagcaactctgtgttaatggaaatgaggaaagtttattgccaagggaagcctgccgttcatgagcacctcggggcttgggtgttgagctgagtaatgttatggccacggtctcaggcaaaggagcaccacttgtgcctgtctgtctgttcccctggagtagccagcatgttcctccctgtgacgtcagaccaaggaacagtcctatggacaattggcttctcttcatgggtttcatgggttgtgtggttctcaggtttgggggtgggcaagggcacctggccagggtgtgggcagcaggggcaccttcctgagctgccgactctttgagagattggctggggcttcctggtgctggaaaaaaataggcgggccctctggcgtcaccagagtcctggcgaggggagtcagcgtggctggcttcaagttctgcatacagcatcactcagtccctagtgtagggctttcaagcaccacagggccacacagccatcctgctgaccaccacacagacaggacgcagagggtcagcactcgagagcatataggctgtttgggacttcgatgagctgggtcaactggggtccactcagaccctcaaccccacctgccccggacccctggtccgtagaattcagaggcatgtgaaatcagagctgtacatcccagtctcggggttcgatgggcgggtgccatgggagaagtggcgcaggctgcccaccctcagacccctgcacacccacactgaggctggggaggaaggagactgtgccagccacccgggcctgagctctgcagacgctgtggctttgcgcatttctcagcactctgcgtttatgacctttccggccagatgtagcatagcaggtgccttcctgtcccttcctatcctccctccactcttccctcttttctcactccttccttccatccttccctcttctcctcactccttccctccatccttccctcctttcctccctccctcctttcctcaggaactttgaggggcccctgagtgccctgcccagggacaggaggtgaaggtgaaggtctggggcttcagatgccagcacttcctctttgacctgcaggggggtcccggagtgaatgggtggcagccacctgggctcccattggagggcggagctccccccaactgcagagctaggttccggagaggggaaaccctgaaggatccctgcaggtgtccaggcagctgatggctggggtctgacaccccttcacccccataccactgttgctgtccttgctgccttcaaaatctctcagccaggaaatgagggtggaatgaggtttgcgcctgcagagccacctctgagcccaaaccctgtgctacatgagacgcaggttgtgtgtgcaaggcctggcctgcatcattccagcttctaaccagcacagcacagtcgcgcaaaggccctaggatacgaggagggagctcccgtctcagggagaccgaaaacctccctggaaatccaagactccttattggagccccaatggtagcatgctagctcccctgctgcttgggttagatgagaaaccaggggcaaaagggcttccttgaagggatggggaagatggcgtgccaggcacatgttccctgggcacagggatggaagttctgagctgtaatctactggggaggatccaagaagagaggaacctggactggaaagaagacaggccactggggtgcagttagggcttgctttattatccctctctgaaccccagcatcctcatacctgaaatgagctaaggatgagagccttcacctagaattgccataggaatgagggcagccatgtgtatggcacaggagggagggagtcactccaggtagctgctgacgatggagatggtggttatggtgacagtggtgatgatgatgatgatgataatgatgacgatgatgatggtggttgtcatgatgtgattagggtgatggtgatgatgacaaggatgaggaagatgatgatgaggatcaggatggtggtggtatttatgatgatggtgatgttggtgatggtgataatgaaggttatgataatgacattgatggtgatggtgacaacaatgataatcatggtggtgatggtggtggtagtatgacggtgataatgactgtgatgttgaggatggtggtggtgatgatggtgatgaagacagtatggtagtgttggtgatgatggtaatggtgatagtgctaatggtgataatgtgatggtgatgattacaattgatgatgatgttggtgatggtgatgatcatggtagtggttatgataatgtgatgatagtaatgacagtgataaaatgatgatggtgatgatgatggtgatgatgatgagatggtagtggtggtgatgttggtgatagtgaggataccggtggtggttatgatgatgatggtgatggtaataattgtcatgatgatggtggtgatgacaatatgatgatggtggtggtggtgatgatgtgtgatggtgaggatgatgatggtgatgatggtcctgttgataggatggtgaggatggtgagcatgatggtgcgacgatgatggtgaagataatggtggcgatggtggtggttaggatgatgtcataatgatggtgatggtgatggtggtgataatggtggtggtggtggtggtgatgatagcgatggtggtggttatgattatgtgatggtgatgatgatagtgatagtagtgatgatggtggtgatgatgatggtgacaataatgatggtgatgataatggcagtggtgatgatgatggcccaggcaagtggatcacctgaggtcaggagttcgagaccagcctggccaacatggtgaaaccccatctctactaaaaatacaaaaattagctgggtgtggtggtgcatcccagctactcaggaggccaagggaagggaatcagttgatgatggtgatggtggtgatggtgataatgatggtggttgtgatggtggtggtggtgatggtgatgatgatgatggtaatggtagtgaaggtgatgatagggagagctgactgagctgagctgggagagaggaagctgaagcacagggttctacccatgatgggagggatgccagtgccatgcagggaggctgacctgagtggggcacattcctcaggtgtcgtcttgaacagaggctcccacctgttcataggagcatcccaggagctgagcaaggtgatcgactagcctgggcctcccaaagtgctgggattacaggcgtgagccaccgtgccctgctgacaacgccttttaagggaaagacccaccctactgttgaccttcattgttctgattacaatgttgcaggactatgaacgcacacaaagctgggagcccttaccaggcggtaaaactggaataaaccaaataaactgaggcctatttaaaagcaaacacaaaacagcgaaaccaataacatttaaagttgcagcacgcgttttgcagggcagatgcttctcggtgacagggcactggcagtgagctccagggtggagagatgtacctgctggctctccgtgtgtatacatttccccgcgttccgttcagtgagctctgctcttacatacttaaggacgtgtcgcatgaaggcgtcttaataatcacgtggctttgtttgttgtcatcacgccttatatttaacccagagctctcctggaaggcacttttatgagcgggttcctgataacttgcctaagatgtctctttcgggtgaagacaagctttgccttgcagcgtgagtaagcggagctttaaacgggaataatccaattattgcagcgactgcgaacagaagaaatgttcattgcatatttactgctgcacttactcctgatgaactgctctgagacggggagagggaaggcgggaagcacacacagtgtggccctgggtgcaccacccacagccccagagagcagctcgcacaccccactgacacattgagctcctgcctcttcttcctgttggaatttacacggggtattgggagtggatgggcctttgctggatgtgatgtctgcatgaatgtgcacgagtacacgcacacaccatatacacacacacacaccccacctcacacacatgggcccctgggacagcatttggaaataagtgtccctccagatcacacttaagactgtgctggatttggtcacagggctgctggatcccgaaacccttctttcatcgaatcagtcaatgttccagaacaagtaactcgtgtcccagacagctgcccctaggaacataggagggggctggggacagcagaggtcgccttccagcttcagggcaggggtgcaaggaaaggagctggaagctagcaggtggggtggggtaggcatcggcctttccacacacactaggccgtgagagcctgacctcgccggggagagtgtacccaggtacgactagagctcccggggcagagcaggccggcaggggctgggggagagatcctgaaaaagaacggtctcaggatccagcagccctttgaccaaagccagtagagtcttaaggagactggggtctgggggtgccccttgggtaggaaaggaggggagcggaagcgggcctgggtttcttctccctcgggagtgggggtgccactgtgacctgcttcttggtacacgtgagtgtgcacgtggatgtgcatgtttgcctgtgggcacctgtgtgcacgcactccaggggcagggctcgtcctgtctgcaggccggatgagagcttgtctggcagctctgagatcatcacaggttctcaggacactcagtagcaagagccgtcccacttcagcagttcagatgttcgatcctgttatagcaaacaagttcagatgtctgatcctgtatggcaaacaagttcaaatgtccgatcccacgtaacagacacaccctgctggattttgacggtacagctcctcccatgccatctgcccagccctacttcaggctgagaaccccactcagctgtctgcttctcgtcccccaagttcaggctggggaggagaggatgggaagagccctctggctgttactagaagcactgccagctgtggagaggcccgcagcccttcatccctagggcctggtacaatggatgtgtatttgtcccacttcagtgggtgcccgaggcggcacacagctcgagtgggtgtctcaggaccggctccttccatccagtagaggacatggggcagagggtagaggcccctgtctgcagagatgacctttgcagccggacctagaggtggcttccaccctccctccaccctgcatgcgtgtcctccagctgtgtctagagctgtagatgcaggcgtggtgagaggaagctgggtggcagctcccagggagggctctcctctaaggcactggtgtgtgtccccacactgaggacgtggcacaccctctcctgcacgggtccacccaggtgctgtgggccgccctcctgggaccctgcctgcccgctgggagtcggcgcaaccctcagctgcctttcctagggtaaactttcctcccaggcctttgtgtagatggggtttttgaagtcccctttaactcggtccctgtcacccaaacagccacactgttctgtcctcaactccattcaagggtcgcccaaccgtttttggcaagttggactttcggcaaattgattgggagcctgaacaaggctgtgcggaggacctgtggccagccaggccccgcccacatctcagccctttcttccccatgctgtttgcagggtcaccaggcctgctcctctcggagacttcaaggagagcccggctcctgccctcccctggctgcctccctcccctgaaacacagtcccagcccgcactgggcagcgtcctctgcgctctgccctcctggagcccaaggtttttatgctgccactgacgagggtctaggtgcagcggctgcgtcatcccggggactggggggccttggagcgggagctggcctctgtctggggaggcagcttgaatgtacacacagaggggacctggggtggtggaaggagccaagcccttctgtagacctggggactcattgccagggagccaggtggccccggggatgatacgcatgtgtggttagtctgcaagagggcacacagtggacttgtgtgtgagtgtgtgtgtgtgcgtgtgtgcgtttgtgtgtggacatgtggctgagtgtggtatgtatgtgtgtgcctgtgtctacatatgtgaatggcatatatgtacgtgatggagagcatggtgtgggatggaagatggggctgactggcaccttagagaagtgtttccaggcagagaaagagcactgctggcccagggcctggctgggctgggactcgggggctgtggggtcctacagaggcttgagatcggtgagactctagatccagtctggacaaacccactctgagacgcactcctatgccccctttctatcctaggcaggggctccctggctcccttctccagccacgtcctaagcacctgctcctaccggcccggggacaggcactgcagacataaatacgcatgagaccctgtgccctttacgccccgtgccctttacctgtcgtgtgctcaggaccccccaggttagcccctgtggatgggtaatgacgtttgtctgcccagagcccacgtttcagtcaccgtcactcacgctacctcaggaagctctgtcagcccctgggcacgccgcttcccttccctgagagctattgcaacattgcgaccagaggggaggcctcctcacccgagcccggggaaagggagttgtgaaatgtatgcttgaaaggcccctttgtccccgggacatggtggcccggcgctgtgcctctgaccgtctccagcaggaagtgggctggggtgggtgagcccagctcctgccgtcaaacaaaaggtgttgtgtgctcagggccggcccgctggtgccctcgggagggccaggcccagggacggggcaggcctgctgcctgcttgtccctttgttctgcaaatgctgagagcaggcgagagtgtacatgtgggtgcatgtgcagatacatatctgtgtgtgtgcatgcatgtgtgtgcgtgaacgtgtgtgcatgtgtgcgtgtgtgctgcacctatagatacgtgtttgtgagcatgcatgtaaatgggcatgtgtgtgcctgtgtgtgtgcctgcatgcctttgcgtgtggtgtgtggtgtatacatgtgtgtgatgtgtacgtgtgtgtgttgtgtacatgtgtgtgtggtgtgtggccaggcatggcagctacagcataggcagggctggagccaccttcaccagcctaagtccccccggaccccgccgtccttccttcttctccttcaggtgaccctgagcaccaccgtgcatagtaccacatcatgtctggcagggatgagggtcctttccgtagacagccagtgggctgggccctggcactggagagggtgtgtgtccaagatgctgaaagctggcacatcaccccagatccctcccccatcctcagccccacagtcccagtgagctctggtggcttgcatcctagcctgaccgagagggccccaacaacacagcctgtaggttctggccagccgagccttgtgctgggtagtgcgctgtggcctgcgccgtatccaccctcagcgtccttctcccgggatttcccagcccagagcatgagcttcgtggtgggcatgaggtcccagctgagctcggtagtgaaggatttgggcccaggccacctcctgtccaccctctcacagcctgccctgcaggcaggtcaggacctgccctcggacaccacccacactgcccgggttttctggtctgtgccaaccccactcctgctggcccaggccctgccctgtgctgcagagagtgccagaactggcccgggcagatgcagaaacatctccctgttgcagttgaagggctcacttcacctgagacagcccagtccctgcttctggctgttagggcagaacaggacaggcactggggaccccagggggtttctgaggccccgttcagctcaagatgagagcaggagccacattgcactaaagactaccttgggcgccatggtacggggtggatgggagcccacgtggggatttcttttaagccacactggagcctcttcctttcatgtccttcagtgttggtgctagagaaacacaccctcaacacacacgcgcacacacacacacacacacacacgatgctttctgtaatttgtccagctcttttctcaggcattgcaaggggatttctgctactggggcatgtgtgtttcatcctgtagcttcctcgtgggtttaaggttcgtgtttgtgggtgtctgagattttctaccatatttactgttacccaacacgatgcatcagggatgggagacacagctgctggtggctttctgcaggaatagaacagacaagaaaaggggccccgggaagacgcatgacagattccggccatccccactcatggcgccatcccctctctcagcgctgtccctcggggttggtggacgtgcagcaggtggctgggaccctctgagggcctgggagctgcagcctgggtggcttgttcttcctggagtcgccctgggaagccggggggttccctatccccacgtgccatgttagtggcaaggagcacagttgctttttctcggagggagacactgattctcagctggagtttcctcacctgactcttcaggtgaacgagggatgttcccatgtctcctggtctcctggctgtctcagccggctcaggctgccgtagcaaaactccgcatactgaggggcttaaacaacacacgtttattttctcacggttctggaggctggacattcaggatcatggtgctgataggtttggttcctggtgaggatctgattcctggcttctaggcagcatctgcttgctgtgtcctgagatggtgcagggggctggggaggggagagagagagagacagagaaagagagacagcgagcacacatgcttgaactctctggagtctcttaaggacaggaatcctggcagatcagggccccacactcatggcctcatctaaccttcttcaccttctgaaggccccatctccaaatccaggggtgaggctgcactgagaggatattgcatccctagcactgacctggaaagggattgggggtagccatgcccggctggtggacgcctgcctccctggctgtgggtgtgaaggtgccgggggtggggtggggcaggactggctgggacacagcaccccacagcgtcctctgccgtgggtgctgtggcaggcatgaccagcccatctcagactcctctccactgcagtcatgcaggcttcaggcagctcctccccccttgtcggaactgaggacgagaacccattcattctgcctgggatgctgtccctttgtctgtcttccagagggcccctgacctcccagacctgcctcccctgcgatgaccccagggcctgtgccctcgtggggtgaggagtgagctgttccccaggaccctgtcctctgctgcccactgctcctataggaacagccactgcctgtggtccagcggcatgattggctgaccctgtgcaaaatgaaatgcaaggcccttgttaaaaattattcagaatttcaagacttgggaactgcagagcgttgtccaagcggtggccctcctatacctggagccgtgtgcagcagcctgtttgcatagccatgaagccagcccgctgcccgtctggaggacggtatgttagcacacatgtgtgcacacacgtgcatttgcacaactgtttatgtagttgtcatatccttcctatggcgaggaatcttggaaattttttcaggttttcaagtaaacaggtatcctggggaactacagttctggtttatgcacattgagagttgtgttctttatttaaaaaaaggaaaagaggtgacatggaatagaaaacccaggagagaggaggaagccaagggctctggagcttcgtgaaagggaccggggctgcagacgggaggtgggggctgggggccatgggggccactcttgccctgggcctgggtgtctgtgcagcctgggcctggtgtgggtgacagagaggccttccctactctgcagggctggcaactgaggcagcccagacactgggttctctgcatcctggggccagtggacccatcaaacattgagccccaggaaggagggacccaaaggaaaacaggaaggggcttcatgcgtgcattgcccacatccaacaagatgagttccaagcctctattcggaacagtgaggaccccgaggaactcggaacagtgaggaccccgaggaactgtgagtgggcgaggaaggggaggaaaaggcccaccctggccctcccagcactggcatgaagcgagccacatgcagtccatccacttggcacgtagagtggggtgcctggctctcaccagcgagtgcagtggggatatgtgacttcatccgttctcctagagcctcggacccaaactttcaaacttctttttcatgtaagatgcaaagttctccctaatctcccgccatagggttgaagtcggtggtagaatcctgtgtatataagtgtgcatgtttataacttaaccttgaactaaaatactgccgggcaggtgtttggtatctgatctgaatgcctacgtttttcaactggatggcaacccctgtttgtaggtccaatttttataaaagtaattatgtgtgcattaggaaggacatattttttcccagtttgagaaatgactaatcgttcttttgagattcccgcagcgaaggttatgttaatacaatcagcttttactccgccatgaagtccttctcgtgctttctggtggagagtaatctccagtctgcctaacacctacagccacaaaatagggtgggcctccagggaagagagaaaatgcaattctctctggcatgggaggagttaatgtgggcttcagagtccttgtgctggtggggagccagtgcccccatccacctggccctgccctgccccctgccctgtccaagggccatcacaaggactcacatcctttaatcttggaggcttgacatggctggtgctgggccggccccaggggtcagccgggcatctgcagatgagacgaggcgggagtaggatgggggccaggggtggttgtaaaatcctccagtcaaggatgggaaatcgactccccatctccagcctggcctcactctgagctccaagcctgggcccccttgttcccctttggttacctccctgtgcacaggctgccctcgctgtatctgaggatgtcctgactgggaaccccctcctcctgccttcttctggctctcaagtggattccagacaagagacagtgaggcagccacactgcaggaggggccatggctctgcttcacagacatgtctctagctccctcgatcattgcttgctgctccacgactggccgatggcagagcgggacttggggagcaagcactaaaccaggagaccaggaagctggcaaagcccctgggcccagtgtccctgtgtgagggtccctgggtggagccacgccgggcattgcctgagggcccccccagccagtgccaggacccaggtgccctcagcaacaccctcacgatccatgagagtagcacgctgattgcctctctcttttctcccacagcaagaatcatcaagaccaagcagtggtgtgacatgcttccgtgtctggagggggaaggctgcgacttgttaatcaaccggtcaggctggacgtgcacgcagcccggcgggaggataaagaccaccacggtatgtggccctcggctttctcgtgggtgtgctggggagggggtatgtgtgtgcgggcctccgacgccacccgggctccgcggggacaggtggcagctgctcactccatcctcatgcagagaggccagggccctgtctcctcccccacctccctctctggtgctaaattcctgaccatctgtcctggggcagacggtctgtgagtacatgggggctgagagctggatgcagaaccagctgcaaggctggtcagcccagaagtcagatcactgaccaggtctcgaaaccccctggttagagccgtcttgtttccgggactgatgtgcccgtgattttgcaggctggaggaggcatccgcccctcctgaagatgaacttctgataactcccccagggcacggcgggggttctgtggagacagggccaggttcaggttccgtccaggtgtgctccttccgtccctgggcctggcctggtggctgctcacaccagagacccggagggcccttcagctcctctctgtccccctgagtggggcatgcagtgcaccccgccctcccaaagccacggctgacctgggtctctagagctgctcttcccaagggcgggagcttggggaacgccgggtggacatgggccttttctgaaggcggcgcctccaggcatgccacggatgctgaggcggtttcccctgcagaggggcagaggaggggagcccacgcccacgtgcatggggctcggggcattcccatgaggtggcctcaactcctcactagcgagtggcaccccctcatcctggctgctcctcctttgaggttggcattggaagctgaggacgtgagtgggtgagcgtttccctaacacggatccgggctccacgctctgggaataggtcagggagatctgtggctgggcagaaggatctggaaagccccctggcatccgagcctcctcccaggattgcacagggagagggggctgcagctcctcacactgggctgcagggaaatccttccccttgctgcctgagcagcctccaagagagggctcggctgggctgttccggcacttggttcaagaggccaatttggtggagttgctgcaaggagaaccacggatccctggggttctaacgtaattcggggctctcagggtcgtcttctgagagtcgcacggctttctgctgcagccaggatgtcagtgagatgggcaaggcggcactccaagccccccatgggtttctcagggacctcttgcatttgtggaagttcatgcagactcagcctcgctggcagcccagggcctccccaggtgtgggcctgcaggaggagtgtgaggccaggcaacggcgccaccccgaggcatgcggacaggacaggagatgagggacgtgggttgctctaagctgaggtcctgggctttgcctggtcagggtttgtttatctggcattaagtgcagaagcaaatgattccgtcctgcacccaggaaatgcacagtgctctaccatgtccttactgctacctgtctgcagagggggtctaggctctcctctgtccctgctggttggggttcccaggcctgcgttaccgccctgagtctccagcaacacaaacagcaggtgcattccatccacctgtggaccccagtcaggcgcagcctttcgtttccctcatagaagcttcaacataagcggccacctcgccctgaatttgggagggatgggtgtgaaagccactctgggtcccagcttccagtgacccatcacttctcagtcgccctttgatgagcccctcctcctcgtgatttgaggcccacgaggcgcccaggccagcgttcaggctgcaccccttcaggaacgaactcggatgcacctctgtgagaggactgctcagttcaccggggtgggaagtcagggagtccacagaccctgtgagagctggcggtggataagcaggtcatcacttggatgcaggcagccctgctgagccagtgacagggccaggactggcccagcccctccaaaggcatcgaggtgcttgtcaggaacaggattgggtccttacctggaggctgctggcatcatcacattttggtttttggtaatttattgggctgaaattcacataacatcaagttgtcgattttaaagcgagcagctcagtggcattgggcacactcacagtgctgtgccaccaccccctctaccttgcttcagggcatttgcatccccctggagggatgcccttcacccaccaggcaccatcggggtcttcagatctgcatgaaggcttctcctgtgcagctctgcagccgctcctgcccagggttaccgtggcagaccttttggccccactaagggcaacgctaattaaagtgaccagtgaagccccccgtatgcagggcgcacactggtaagtgggggacacagatgtggcctgtccccaacctgtcaggctgcctggataatgccttgtcagacagcttcatggtgttttccttcactgttggcccaaaccctggacccagccctccctgcctcctgcgttcacccagaacgcctgtcttctcctctctcctcccctgtagttcttcagcacctgagtcattctcatgaaatctcatcagggaccccttcacccaccccagagccagaccagggccacccaaccagcctcccgcatccgtccagggccgcccaagcagcctgccgcgtccgtccaggtctgcctggccagcatggcttctgtgtgtgcagagacagagaaccgaggtgctcaccgtgtcagctcagtccaagcccacagggcccaccacgggaggcagtgagccccccttattctggggcatttgaggcagaggctgaccaggcacctgggatattccagaggggttcgagccttcctggctttgggaacaatagctgcacctgtccggtgcttggtgtgctcagagagcctgggggagatggctgcagactccctttcccttgggcctcacgggcttgggagctcagtttcacaggcttgaatactgcggctgggtgagctggagtgactgctggtggccaggtgtacagaagtccagggaggtgggattgattctgcttgttctgctcaacacaaaggccagacctggcttggtgtgagaccccaagtggctttcagctcgggagactcagatactctgatcttcccatcattaggacactgcaggggaccccccaagcctctgctggtggaggcttagagggcacctgcagggaccagggacatgggcaggtgggagtctgactgtagcaggacactccgtcatccagcagaggaaggacggctgtccacttccaggctagtgactctcaggcaccctgattcttctagagagtgaggtctcataggtggaggggacggctctgctttcctgggggagagtgtgtgtcgggggcttgaagacctgtctctcagcctgtgcctcatgttgctatggcgggggcaccttgtatacatgggccgcggatgcctgggccggtagatctcggtgagtgaccgtgtgctcactccaggggaccggggtgggccctgtaatcttcccaggtatctcgggagaagtctctgggaacagcaggagagccggctcctaatggaatcactggcctgtggtgacctgtgttcaaagctttctgaaaaggttagttgagctcttgaaccaaacaccatagaattggaagctacaatcccagttgtgcgattgcatctgagttctctcctagatggtaaattagcgctacatgagatttcacactttaccataaattggttttctgcgagatgatggcgttctcataacttggcttttagagactcagcggatactgagttgctgctaattccatcctaatggccacgttctcagattagagctggcctccagcccaggcctgatgcaggcagccacccgctcccagcctgcccagctgcgcgccaccatcgcgccgatcccccgtcactcctcaaccccttccggtgtgggccgttgccgtttacttctctgtgtggcgccaccagagtgtgggtcgcctagcacgggcgctgggcctaagggtgctgctgccccgtccccttgcaatgcctgcgcctctctgtgtgacacgtggattcacgattcatggattaaccgagtgtggaccccaggcacatgctgatgcttgtgtttccaggatcactgcttttttggggatggagtttcgctcttgtcacccaggctggagtgcaagggcacaatcttggctcactgcaacctccacctcccgagttcaagtgattctcctgcctcagcttcccgagtagctggaattacaggcacccaccatcacacccagctagtttttgtagttttagtagaggcagggtttcaccatgttggccaggctcgtctcaaactcctgacctcaggtgatccatccgcctcggcctcccaaagtgctgggattacaggcgtgagccaccgtgccggcccaagatcactgcttttgaaagtgcaggccgtcaccccattagtgggttgtgaaattaatttaatagatcatgaccagcatttaaaaggaggaaggaatagagtgaaaatgtgagagaacatctgtgtcaggagggtgagcgcccggtgacaaagcacgcgcctgggcacacaggctcacatgggagaagcctttctcctaggttgctatgaaaggctggaaatccgcatcctgtggggactggagagaaactgacctctgcggtgcttttccaggtgctgcctctctgctggctctaccttgtggacgtccacctgccccaggcgaggggaccctgggtgggtgtttcaggttctcccgaggtgtgagcaacgctccttcttggcccgccactctggctcctgctccctggggacaggcctagagctgctgtccgccctccttcccattcctgtgctctgcctctgccttcctctgtccttgagttgggctctcagagctggaggaggagggacaggcagggctggtggggccgaggggagcaggccaggcccacacacaagcaggtcttctctccacagacgttccttggctggggctgcaaaccacacatgcaactggcttttggaaatattctcatcagtgtttgctcagccacgtttttgtagtgtttatgtattgcaagatacttgtcagtgagctgtgccatctcctacatcagaatcagccagctagatggaaatcctgtttgcacattcgctattgagtaccaccttctaattctgtgctgcatgaaatcacagttgtgggggtgaagaaaattcagcggggtttctgtatggttctattcgggaactcgtatttcatggcaactcattacactaaaagcccatttgcccaacgtgagagattctgaggacgtgcagacggcagctgccgctgatctcgtgggggctcggatgtctaaattccaccccggccaggcatcccaggagtgtggtgtagtcaggccattccagggcctccgttggatatggacaagaggacactgaggtctccttggggcctggtggcccggccagcagcctgccaaaatgctgtctcttctctcgtcttgccataaactgctgctgacttgggctgggcagcttgtgctgtcagcctgccggcgagttctggaggtcagactcaccaccgatggatgattcacgccacctacaagcccctctgggaaaggttctgtggtcatctcgtggttcgagagctctcccgttggcatctccagcagtgctgagcgtcgtccacgggggccttgtttgggatttaggagccagcttgctacggggaggagccttctggctgcacagcccctgtcccagtggatggcttgccttgtccaggccaccaggatccttgcccctgagcttcctgcaagctcggagcctggaggaggggcccatcccaggaaaggcatctgtgcggtagcaagctcaaaccgtgaggtctcttcgttctcggattctgagggcttagcatgtgtcaacgtggccccactaacagatccatgggaagaacaggctaggacctaccctgcctcagagcacccccagcgtgaagaaggaggtgtcaacaccggggtcccagcccagtcctcccgtgtctgtgccaatccgccaggcagctggggcacaagagtgcgttcccgtgccaggccctcgcccagggcggccctgcagaaggacagagtgtccgtggcccgcacactgagccctgattcttggaggagccatccatgggagacagcagacgcttttgcaccagggtcccagttaaagaggacgagacactcacacttcctttatgtgccttctggaaccccctgtagggtgacagggacacgaaagggggaaaatggcctcctgctttgagtgcaaactcagcaagacaggtctggaaggatgggagcgggtggacggagctgacaagcagagctgagccccaggagagcagtgtgtgggctctgcctccattctgatgcagggcagtgctgacggcctcctcccagcgctgtagaggtgggcccagttgacaggctgcataagagacccctggtccttcccacccaccacctgggcctcagctccctgcagaatccaaagaaaactggactcacagaggctcatgctagagagggagagacctgggcggcgttggaccctgcagcggaaacacagccaagcatggcaggaacttctggaaaccaggcgattaggtgaaaatcgacgttctgaggtgagtccccactcagctccctgagggctcagtcaagagacaggaggcttctttctggatacacttcctgcctgtgtgtcctgcggccaccataaccaatgaccacgttctgagtggctgaaaatggcagaaacatattatctcaaggtcctgaaggccaggaggtccaagatcaagtggtcagggccctgctgtcttgggaggctctcgaggaggcccctcttttgcctctcatagcttctggtgaccccaggtgttccttggctcgtggccacagcagtccattctctgcatccgtcttcatggggcctgctctgtttgccaaatttccttctcccttttcttataaacactccagctattggctttagagtccattgtaaatctaggatgatttcatctgaagatctttcactaatcatgcctggaaagaacctatttccaaatcaagtcagattttgaggttccccagtggacatgaactttgggggccccccattccacccactgaactcacccggcccagatcagaacccatgggtgccatgagttgggggccacagggcccttctgtgaagcccacctgccaccagccggctgttcagtgctgtgctccgaaacatggtggaaagcaaaggtcactctgggagagaaacaaaaccagaagaagccaaaggaagaggagcgaggaacgtagaggccgcaaggagtcatcgagacagcagaggaagggccagcacaccaactaaaccacagctcagcctcagagacagcggacatgcatccagacacaggatggggcagggaggcgaggaggctgggggtggggcggggcagggaggtgaggaggccagggcctccatcttcctcctcttgggtgctctgcttcctctccctggctctcagccttagggacatgtttggcaggtggaagggtgtggttgtgaccccatgtgctgcctggaacactggctctgacccctgagccctgtaggtgtcattaccccaagcctgtcctgctggagagaagaggggagcccaggactgggtgagtggtggggcctgctggcccgacccaggcgcctcaagagacagaggtgagcctggccagcaagcctgccccagccacagatgtcaccactgagtttggacagtgagtctggatgctgttgatggcctggcagtagacaagtgggatggggagctcattaaaggagtgtcgagaagcctggagattttacatttaagtctttaatccgtcttgagttaatttttgtataaggtgtaaggaaggggtccagtttcagttttctgcatatggctagccagttttcccagcaccatttataaaacagggaatcctttcccattgcttgttttgtcaggcttgtcgaagatcagatggttgtagatgtgtagtgttatttctgaggcctctgttctgtttcattggtctatatatctgtttcggtaccagtaccatgctgttttggttactgtagccttgtagtatagtttgaagtcaggtaacatgatgcctccagctttgttctttctgcctaggatccacacatatgtatattgcagcactatttacaatagcaaagatgtggaaccaacccaaatgcccatcaatgatagactggataaagaaaatgtggcatatacacaccgtggaatactatgcagccataaaaaagaatgagttcatgccctttgcagggacatggatgaagttggaaaccatcatcctcagcaaactaacacaggaacagaaaaccgaacaccacgtgttctcactcataagtgggagttgaacaatgagaacacatggacaccaggaggggaacatcacacaccagggcctgttgggaggtggggggccaggggagggaaagcattaggacaaatacctaatgcatgtggggcttaaaacctagatgacaggttgataggtgcagcaaaccaccgtggcacatgtgtacctatgtaacaaacctgcacgttctgcacatgtatcccagaactgaaagtaaaattttaataagagcctggagagcgctttgggaaactgtacacatacacacacgtatatgtctacatggcagagatgtgtgcatacatgtacatatggtatgcctataggtactgtatgcctgtgtgtgtgtagcagcagagtgtattacaaacccagtagaatgttggagacataaaactgaggcaatctctcagaaagcagagagtggaattttctaaaagaaatgggaactaggaaaggaaaacaataatcagaaaattgattcaggagttctgaacgatataacctcctgaaatagcagaaaatgaagaagaaattatcaaagaaatgctttctaaaaatctctccagaactgatgtcagtttccccgtgagagtactcatcaagcccagaaaatgaatgaatacagtcgcatcctaaagcatgccagcatgaaatttcagaccacgggagatgaaaaacatccccaaaactcagagggaaaaaccaggtcatgggcaaagacgcccacagcagcgtcgtcgggttctcagcagatcgccgaagccgggaaacagtgttgccaggtcttgcagagcgcaggctgcgactcctgacctggaactccatcactgctggaacgggccgtcaagggtgcaggaagaacaggctccagccctggacatcccaggaggagccctgcacatcccaggaggagccctgcacgtacctgtgcttcggaagatgaggggaaggggtcaggggacaagaggtgtctcccagggagagggcaatgaagaagcacccaatgtttctagcaggaattcgcaaatgaattccaaatatgcaggcattcagggagggaaaaaacgaagatttttctaggaaaacaagcacaaatgccctgaggctccagcgtgggaacgttggagagctgtggccgagccagcactgcctcagccagatccattgcccacgtattcatcaggccccgttctctgtcgggcactgcaggtgccattggagagttccagtgcttcccagggaccacagagcaggcatggcctctgccctccaggagccacacgggggtgatcatcattgggcacagcttctgaggggggtgatggcccagttgaattggtcagggcataggcaagggaagagggtccacccaggtcctctgggccagcaccctggagagccaggcttaggcatccagagggaccaggttgtcaccagaagtgaataaggccccaggctgggcagggccagtctgcaaggcccgggagccgtctgtcctgcgtgtggtgggggaggacacagagccacttcatctgggagtgagatagagctgccttcacgagcccaggtgggctgtggagctcgtggccttgcatggccagggcagggctgctgcggacagcaggccacgggctgagcagaagcggagggcccgggagggtctgcaatgccctctcccagagacaggcaggcgagagccgaggtggtatcagggtgcacccaggcgtcctcacccggcctctccctgggatgcccatggccacttcctggccccctgcacagcagacactgggccccgctgtggccgtcattagtcagcaaaggccggggctgctggaggaagaagggggatgctgtagctgaacactgagcctctgtgggggcagcggggaggcccccaagcaggaaggtggtggctgtggttgtggagggaagtcaagaggtgtcttgagggaggatccacagttaccaggcagccaaccacacgcaagcagggagggaggacatgggcctggcagacctgtgtgggcgccatcctcccgtgcgacctgtgtctgccctgtccgacccccattaggagcctgcggttcatctcccagagcactccccagagtaccagagcatctctggtactccccagagcacagccaagccggggccttggggccccctccccgcacaaggaccctggtcccagccaggcttcccccggccccgtgaggtcaaccaggaattcacgcagccctttcggattctggaagtttcttaagtgactgggagttccacccccgccccccaaccttccagtcctccgtgtgagcctcttccctctctgttgctgggagcattcatagtccccatcctgcaccaggcttgccctgcagagacagggtgcagcttgtcacttcctcccttcatgtgacaaggtggcccctgcccccggctcactgtcaccatggctgagggcccaccctgccctccaccatctgtctgtccccatgtcctcctagctgagcaatcctctttgcccggccgggtcagctccgccttgaggactggggagcatagctgttctcaacgtggaagaaacgcagttttaatccattttatgggcccagggggattttcaactttttcttttgaatcccgtgtggggaggtgtgcagacattcctctcgccaggggccctggcctgcacacacccgcaggggctctgcttcccaaggccggctcaccttccccgtccttctggaactaatgccaggtggacgcagagccggcaggactgaagagaaccgcccctcgggtgaggtggcacgtcccgttcccctcggagccctccagccagcagctcagccctggctgcctgggccagagcccagaggctccaagtccgtctggagtgtgatcagatggcgttcatggagactgactcagggaactggagggagagggaggctgagctcaggaagaggtggctgcgatggccaggggagaggaaaactgcccagaaggatcgtgaaggaagaggagagagaaggacattccctaccctctcaccagcccaagagagcagggtggtggtgggccgaggtggcctcaggactgccccccctgcattctctcccaaggacaaagaaggctgaggcttaaacaggtctgagagacggcgcaggggtgggtacttggccagaagtggccggggacccgcacctaactaatcttttttctgcacaaacaatgaaaaatactaagtcattactctgctccctgtctgcaatccattttgcgttcttttgaatcaccgctattcatcaccacgataatggctggacattttaatagattctgtgtgtaaacaaaaacgtatatggccggcgccacatcagctagtattgtaagcagtgacactcttcattttctcagcagaaatgagcccagaaacaaaaaaaaattggtttgaccaaacccacattatttctgtctgcactttgggccacttttgtaatgggagacgtgacacgctgggcgccatttacagtaattgtcctgcattaggctcgatcttccttaaagaatttgttctttgaatcgttttaaatacataaatggcaaatggctgaaatgtgaggacgctcgcccggtgcagaagggtggacggggtctgtcgcgaaacccagtgggtgtggcggggctggggatttcctggtgccccctactggtcagaaagttacgttacgttgggtcagggtgaggatcaggcttagggtttgtctgagtgacatgatcagtgcctccttctccttttccctgcccttgcttccctgtcttctccccaccgttcccatccctctgacactgttttggtgccaagtcagagactggaatgcagagatgagacacgtgacccaacatctcagggacacccctcgagaatcgctggaggggtcactttttggtgccaaatgggcctgcttggttggcctctgagtctggcacatcactgggaagagaggtgggaaaggcttgctgagtaaatggcagacagcactctgtttacctggcggggactgcggcaaggtgctcacatcccaccgtgcatagccaggacagaggggtcctggggaccatcctccggctatgcaggtgcggggagcctggtctccaagacatggggagacaccctgtcttgttgctgacagggcagcttcccagaagttctcattatgttcacaatggaaatgcaatgccttggtccccaccacgctggcacctgggcacggagcctccacagggttccctgtgctcgagacgtatttctgagcagcaccttccagggcctggctgtggtctagaggaactctgctcacagtgcagaccacggaatgccctggaagggctccacgtcctgcccagacccctggggaccctttctgggtggatcccagaataggcacttcttgttcctgcctcaggccccctcatgcacagtgaagtcacacccacgtgaagaccccggatgaggaacccgagtggccccctctcctgagggcgctaaggccactgtcccctgctgggccaggctccctgacagccccactgtgtggttgcccaagcaggaaggtggacgtgagctccatctcgatgggtgaggctttgggatgctggactttcaaatggccctggaatctacacaatcctaggggaaggatagagtcccgccttagacactggagtcttccccatagagggttgcccctgtgagggacaacctccctggccattctagagcagcctgggccactgcccccgtgccaccatttcagcccgcccactgccttcatgccacccactgccttcgtcccgcccgctgcgtgtgacctcagatcctcaccagagcactgcctccgtgctgctgtttcaagcccgtccactgtgtgtgatctcaggtcctcaccagagccgttggaaccggtgccactgtctgattccaagtctcatgaactgattggcagaaggtgctggccaagtgctggaaaacctgtttttctcctattggttggcagaaggtgctggccaagtgctggaaaacctgtttttctcctattggtttataatccttataatcttacagatgacatcactttgagattaatttctttgtaaaggacaaagatgaacttattccttcctgactgtactgtggaaagtaagatcagggtggggcacagtggctcacgcctgtaatcccagcactttgggaggccaagcaggcagatcacttgaagtcaggggttcgaaaccagcccggccaacatggtgaaaccccgcctctactaaaaatacaaaaatgtgccaagcgtggtggcacgcacctgtgatcctagctacttgggaggctgaggcaggagaatcgcttgatcgcttgaacctaggaggcggaggctgcagtgaaccgaaatcacaccactgcactccagcccaggcgacagagcaaaactctgtctgaaaaaaaaaaatttaataaacatacgtgtgtgtgtgtctttatagtagaatgatttataatccttggggtacatacccagttatgggattgctgggtcaaatagtatttctagttctagatccttgaggaatcgccacactgtcttccacaatagttgaactaatttacactcccaccaacagtgtaaaagcgttcctatttctccacctcctctccagcatctgttgtttcctgactttttaatgaccgccattctaattggcgtgaggtggtatctcattgtttattgcggcaccgttcacgatagcaaagacttggaaagtgaacccaagtgttcatcaatgatagactggataaagcaaatgtggcacatatacaccatagaatactatgcagtcataaaaaaggatgagttaatgtcctttgcagggacatagatgaaactggaaaccatcattctcagcaaactaacaacaggaacagaaaaccaaacaccgcgtgttctcactcataagtgggagttgaacaatgagaacacatggacacagggaggggaacatcacacactggggcctgtcggggtggggggctaggggagggatagcatcaggagaaatacctaatgtaagtgacaggttgatgggtgcagcaaaccaccacggcacatgtatacctatgtaccaaaactgcacgttctgccatgtaccccagaacttaaagtatataaaaacaaaaattgaaaaagaaagtaagatcaacatgcaaggtgggtgcacgccacaggggcagtcatggccgggggtacatcctaacagtgaggtgctgtctccaatcagctgggctgcacgccacagggcagtcatgtctagggtccatcctaacagtgagcatatgtagaactggacgctgggcagaggctgtgcaaggagtgagtgtgtggctgcattaatccagaaagccacggaggcttctatggacttgcaggggagcccgtcttctcctctctcctccaaacgctggagaagctcgttctagctgtctctagccccaaggccgccctctacctgtgcccagcctgtcccctgagccccaggttcccatcatgacagaccggtccctttgtcacagcacctgtgtgtgccgtcttcttggctggtgtgtccagatgtgcctcattctcagcccagctcttcagacccagatagcagcacacaggataccggggctctgccagccacccccttccaaatggcttctgcatgccacagtgggaatgaaatacgacgtgtggcatgggcgcttgttaaagatcagtctttaaaaatgaaatagaaggatttgtgtctgcatccaaattactttaaatgtcagctccccgttaaacccaagatatggcgggtggcacaggtccttggatgacacctctaccccgtcgtgttcatcagtgccggcgtcttcgtcactgcggctctgtccctgggtcccttcgcatatcacctcttcctgaactggaatataaatctcaggctccataggctttgggcatgattgaaccactgtgtgcctcccagactgacaagccccttccagggatgcggccattgtaccaaaaagacttactgggtcagatcccaccatcctccccctgcctggaagagtgactgctcttctgcgtgctagggtgggagaccttgtggaagtcagtttatctttagagtttcagtttccttatctgtagaagggggtaagaatgcccccagggttgacccttcaggttcatgggatgataagaaaggaaaatggtggacgagaaaggtttctgaggctctgctgtgctcctggccctcttgcttgcttctgccctacctaaggcacagacaagttctctgtgtaggaaaaggattcttgttttccacatgtggtatcttccagagtatcctggaatgtctacatgcccgattagaatccagcattagaatgaagtcagactctcagcctcttctttgggaaacccctgcccatctggtcattggtgctgtgcaacaggaaagactcggggtgctggttgcattgctgcagcaggagagactcggggttctggttgcattgctgcagcaggagagactcagggttctcgttgcattgctgcagtaggagagacttggggttctcgttgcattgctgcaagcaggagagactcggggttctcgttgcattgctgcagcaggagagactcagggtactgcttgcattgctgcatctctcaaaagctttgttttgttgttggttagatttggcactgtgtagtcatggccatgtggcttcaggttctcacaggacacagggacatgtgactgatgaggtttcaagagaggaggattggatgagtgggggattgcagcttccctcctcccgacacctgggaccctccactcacagagagaatgagcttctccagcgtttggaggagagaggagaagatgggctcccctgcaagtccatagaagcctccgtggctttctggattaatgcagccacacactcactccttgcacagcctctgcccagtgtccagttttacatatgctttggaaataagaacaactgtcaataacaccatgacctaaagaaagaaacaagtaagcgctgaaaagcactggggaaagccccctggggctcaaaggagtggaagcccgtgccttatcctctgagccccagctatgacagtgacctcctgtaatgcacaaaaagccctggacttccttctcaggcctgggtctaaccgtaggacttagaaactagtgatcagagggttcacaggcaggcagaggtggaatcctacccacccagggggcatcccctgctcggtcctgcagagactcagctcccagcctgcggcatggcagggaggaaaggcagtgggtggaggtaagtttcacagaagaggcacagagatggcagaagagcctcttagctagagtaggagtaagcaagagggccaggggcgcaccaggaactgtgttcttccgttcagctctcattcccaaaggagcagaaaactctgcagcttagacagaagtctgacctcccaaaagggagcagagcccagccctgaggagccgcctccagctggcgggaagcctgtcgggcatcctgtgaagatgaaggcctgctgcacatcgcccggacctttcaggccatcccggagtgggcagggcttcccacacctgcaggaaccagagcgagactggagacgagctccccgccatgccccatggctcattctagaccaggattgattgacctctgccggtttaaaagggcattttttttttaagcctcaaagtcaaaactcaagtatgagcccgtaaaaaagtaataataataataagcactatctatggaaagcaatcctgtcctaaagattttagggcagaggtagctctgaaaatagatctctgcagtaaacagacaatacttttatagaaagtgtctgcttgttggtgtcacagagatggactgcatggccgtgacccaggagccaggaacccaaggtgaggcaggacctggaacgaaggcagacatccaagggttttctgaatgaaatagaagatggatacggagacaccaaagatgtaaaagtagagtttagttgtgtattgggagctgcaaataacataaatataactgcagaaaatcaaaacagtgataaggagactaatcttaaaaccaagagataattcacagaaaaaaaaaaaaaaaagcaaggaaatggaacaaaacagataaagagaagttggtagatctggaggacagaggatgaatatctaactgaagagtcgtggatgctcctgagggggaacctcaatggctccagcagaaggaagaatcacattagagtgaaaaccatagtgttggaaagaaagttactcgagctggaggaaactgccaacgaaaaaccaaacaaaaacaccctggatctagccattttatggtgatatctttgaatttcaagaacaaaggaaacccttgtgataaccatccagggaatattaagaaaatagaaagacaagagaacaagaatccccacaaacacacatgcaagctgtcccctgaactcagtgagacttagaaccaggagacaagagggagacttatgtaaatatatgattgaaacatcgttttacttatgaatttgttctcatttctatttgttttgttgtttttgggcaaagtaaataaataagacagctttagatttgcaaggatttagaaagcttaccagttatgccgaacccttactgtcttcagtgcggatggcatcaggttcaagaggttgaagaagagacccagagccagcaaatgagacctggaggtggggggcacttacatacagggtagagaggctagtggtggtgggctggacaggtgaactacctcacatacagaaacaatccagtcgtggtagtctggacgggagaatcactggtccagtggtggtgggctggacaggtgaactaccttacatacagaaataatccagtcgtggtagtctgtacaggagaatcactggtccagtggtggtgggctggacaggtgaactaccttacatacagaaataatccagtcgtggtagtctggacgggagaatcactggtccagtggtggtgggctggacaggtgaactactttacatacagaaacaatccagtcgtggtagtctatacgggagaatcactggtccagtggtggtgggctggacaggaaaatcacaaccacatgcaaaaagcttgcagtttatatggcattttcaaatagcaccttcccccaagcaggctccacctggcactcttcattcaaccccggatctggagcctcaatcccctgtgtaggccacgttccataggacgggctgggggctcagatgttcctcatagacaaggagtgtatctccaggttggccactcctggattccctagctcagagcacacattcaggtgtatcttccgtacggggtcactctcagggtatgcttaaattattgctatcaggtacatttatcataccacctacatacctttcctgaacaagtgaggaaaagatgcactcaagtcaatcaggaaagaaagaaacatcaggagctgaacattgaaaaggtcacatgtaagatgattaatggtgaccattgatatcagttgaatacatggggctggatataaatgattcctctaactatggctataaaattgaacataagattcacagcactattatttaatatactctgtatattatgaaaaacaattggtgcatgaaaataacgtggtctgtaacctctagtaaaactaacagaggctgtggggagcaggcagtggcaggctggagtcactcatgggatagaaggagccatgatgatttaagtcgttagagaaatgatgtagtcattaagagtgcatttgcttaacataaaagctatcacaaatagagacaaaatataatttcaactaaaccactgagagtaaaaagcaagtgacacttgtgcatgtatgtaaagacaagaccaatcatgaaaggaacatatccagaaatcaacttggatcatagtgttcggatagaatgtcactatcagtgaagacaataaatgtaaatggattagtctcctctattaaaaagcaaagactatcaaatcaagtgttgaaaatagccaaacgtgttgtcttctaagggcattcctacaaaataataaggttaaaagcaaaaaataaataaagataaatcaggcaaatgcatttgaaaggaaattgagaggtaaaacattaaattggaacaatattgtcatatattgatacatttacttattgacacgtttatgccttacagttcagactgtaatgaaagtgtcacatttagaaatcattatgcactgattagcatacataagaatagattatgtaaacacaattacaaataaattatatgatcagaaacaatttttagctgagatttaaataacttaatctatattaaggtcaagtaaacaccaccaataacaacaacaaaaagcagcagtgcatagatcttttgaatactacaattaactaaaattgaatttgagccacatatctaaattatagtatacaaacaaggctgcttccaattttcaatcattgttgaaatctctacaaaaagagccataaaccaagtcatgaattaaatcacactaggagaagaaatgcaccagccctcttttccagtgagaatacactgtatttaaaattgagacttacaccaaaaaataaaagccttattaaccaggactttcttataatttattgattgaaagttttaataaaagaagaagccacactcacagaaggtcacatgcaatgtctgaagtccatctgctggtgtccaatgctggatggagcaactgccagatggttaacttggagcaaacttccctttctatgcctcagtttctacatttataatatggacaaaataccacttcctagggcttttgtaagcattggatgaattcgtatattaaagtgatttgagcagggctagcactactgaacaatattatatatgcatttgagttattgatatcccatttagaatgtcatagaaataacacacggtatttttgcagatccagtgaaagagctactcatcagtgtatgtatgtctttaaatgcctttatcttcaaatcagaaagaatgaacacaacttaagcgggaggaaaagccacccttcccctcaaagaggagaaaacagctggtaaagctgaaaagaaatattaatgaattttaaaaagaaaggcatggagtgtgtcattgcacctttaacaaacctataaaaatgtggttttacttctttacataaattattttatatcagaaaatagagctgaaaggaggaagcagattactaggctgagataggctgaaagctacacctgttgcaccagtcagccaagttgtagagcaaaggaaaaattattcacaagtgtatgcatagctagtgtatcgatcgctaaatctggaaatttttattaaatgtatattttttctaggggaaaaactaccatacataactgaaggaatagataaatgttaatattcttcagtaaaattttcagagagaaatactttaataggcacgctgcttaaaatattaagtgttcaggtttcttttcccaaatattggaaaatatggaaaatcatccagtttatcttaggaactaaaatattttatatttatttataaatatataataattttatatttatttataaatatataataattttatatttatttataaatatataatatttttatatttatttgtaaatatatatttttatattagtatataataatttataaatatatgtaaatatataatagtcataaatatatttatattataaattcgtataaaatataaattcataaacataaatctgtataaaatataaattcacaaatataaatctgaaaagaggaatcagattactaggctaagacaggctgaaagctgtgcctcttacaccagtcagtcaagttgtagagcaaaggaaaaattattcacaagtgtatgtggtatgtgtagctagtgtattgatcactaaatctggaaattttgtttatgtaatttttaattatataaaatataaataaatataaatttataagtttatatttaaatttattttaaatatataaatataaatttaaatataaaacataaatataaatttaaatatgaaatatataaatttaaatataaatatataaatatatatttaggaactgaaatattttagaaagtgtcccaaaagataaaaaagttccaattatcatctccttccacaaagacttttgagtctgtgatgtgggccaggcaccgtgtcaggcacgcaattccttcagcaagcagcctagcagctgcatacacccacccagcattgtcccgagggcagcagccgcctctggggatccgtgtccctggaatgtgcatcctctggtgttagtactgcatggcacacacattgctcacacctacataaaataacagcacactgaattctgagtcctttaaaagaaaaaaaagaggctgggcacggtggcttacgcctgtaatcccagcactttgggaggccgaggtgggcgaatcatgaggtcaggagattgagaccatcctggccaacctggtgaaacttcatctctactaaaatacaaaaaaattagctgggcatggtggcacgtgcctatagtcccagctactttcaggaggctgaggcaggggaatcgcttgaacccgggaggtggaggttacagtgagccgagatcacgccactgcactccagcctgggcgacagagcaagactgtgtctcaaaaaaaaaagaaagaaagaaaaggccacatgcagtgcggtggagccaacatgagcaacaaaagtgcgtcttgctacaggcccaccttgttttattgtactctgctttattgcactttgcaaatattgccgttttcacaaattgaaggtttgtggcagccctgccttgaaccagtctgacagcaccatgttttcaacagcgtatgctcactttgtgtctctgtgtcacgttttagtaatttcccctgtatttcaaactttattactatatctgttacggtgatctgtgatcattgaggtttgatgtgactatggcagttgtcttggggcaccacaaaccatgcccgtgtaagatggcacacttcacagatggatgttttctgcattctgacagctccactgaccggccagtcccgtctctcctctccacgggcctccctgttctctgaatcaacaatattgaaattaggctaattaataaccctacagtggcctctaagtgttcaagtgaaaggaagaggcgtccgtctctcaccttaaatcaaaagctagaagtgatcgagcttcgtgaggaaggcgtgtcgaaagctgagacaggctgaatgctaggcctctcgcaccagtcagccaagttgtagagcaaaggataaattattgaagataaatgcaagtactactccagtgaatatacgaatgataagaaagggatagaaagttttaatggtctggagacaagatccaaccagccacaatattctcttaagccaaagcctaatccagagcaagccccaactctctcgaattctgtgaaggctgagagaagggaggaggctgcagaagaaaagttggagccagcagacgttgactcatgagtgttaaggaaagaagctgtctccactacataaaagtgcaaggtgaagcagcaactgctgttggagaagctgcagtaagttctccagaaaatccagccaggaccattgatgaaggtggctccattagacaatagattttcaatgtagatgaaagagccttctattgcaagaagacgcccactgtgggatttcccactagagagaagtcagtgcctggtttcgaagcaccagaggacaggctgactctcttgttagaggctaatgcagctggtgacttgaagttgaagctggagttcattttccattctgaaaaccccaggtccttgaagaattaaacaaacctactccgcctgtgctccatacaacgtacaacacggcctggatggcagcacatctgtgtatggcatggttgactgaatcctttaagcccaccgatgagacctactgctcagaacaaaagattcaagatattgctgctcattgacaatgcacttgatcacccaagatctcggatggagatgttccaggagatgaatgctgtgttcatgctgctaacacaacatccattctgcagcccatggatcaaggagtaattttgaaattaaagtcttcttctttaagaaatacatttgataaggctatagctgtcatagatcatgattcctctgatggacctgggcaaagtcaaatgcaaaccttgtggagaggattcaccattctagacgtcattaagagcatttgtgattcatgggaggaggtcaaaatcatcaaaattaacacctgtttggaataagttgaatccaaccctcatgcatggctttgagagagtttaagatttcagtggcggaaatcactgcagatgtgatggaagtaggaagagaactcgatttggaagtggagtctgaagaggggactggactgctgcaatctcaggatagaacttgaacggatggggaggtacttcttggggataagcaatgaaagtgggtttttttgttgttttgtttttctgagacggagtcttgctcttgtcacccaggctggagtgcagtggcgcaatttcggctcactggaactgcaagctccgcctcccgggttcacgccattctcctgcctcagcctcccgagtaggtgggtctacaggcgcccgccaccacgcccagctaattttttgtatttttagtagagacggggtttcaccgtgttagccaggatggtctcgatctcctaacctcataatccacccgcctcagcctcccaaagtgctggattacaggcgtgagccaccacgcctggccagaaagtgtttttttgacatggaatctgcccctggtgaagatgctgtgaacattgtggaaatgatgacataggatttcgaatattccataggcctagttgacagtgcagcggcaggtgtgagagaattgattccgattttgaaagaagttcttctctagttaaaatgctctcaaacagcatcgcatgctacagagaactctttcatgaaaggagagtcaatcgatacagcaaacgttagtgttgtcttaagaaattgtcacatcctcctcaaccttcagcaaccaccgccctgatcagtcagcagccatcagcatcgcggcaagaccctccaccagcaaagagatgacgactcccggaaggctcagatgatccttagcatttttagcactaacttatttttaaggtatgtactttttttagacatgatgtgtttgcacactgagtagactgcagtataatataaacatagcttttatatgcactgggaaaccaaaaatttgtgtcactctcttgatcgtgatatttactttattgcggtggtctggaactgaacccaccatatctctgaggtatgcctgtatttcaaaatcaggtagaatgactatatcaccagactgaatattttaaaaagtcttctaattcaatagatgctgggaaagtcactagggggacacagtcttactcattacaaaacaaatcaaatgagcaaaagcaccaaagccacagacctccagtcagcctggagggtagggcaggcccacccagggcccagcgtccatctgaaacccaagccagcatgtgcttcagcctccagctctgagattttgggacacagaacccagttgccctatgtcttttcaaatggaaccctcacaggcaagttgccctatgtctcttcaaatggaaccttcaggggagtcctgcatggtgactttttggacgttccggcaaatgcaatcacatcagtgtgtgatatgagaaaataacgatccttgttacttgcaggtgaggtaagcaggtgcttcagaaactctagagattggctgaaatgccttggaaactaataagatttcagtaaactggaccgagtatgagtatagaaagttctctgcttgtatccaatgttaaagttttcacagacccagtctgtggtgtagatctgtgttcagcaaactccagcctgcaggccaaatcaggcccatccgttcgtgtgttcattcgcacattgtctacagatgggtgggagccacagcagcagagttcagcagtggcaaaacagaacctatggccccagagctgcaaatgcatatactgtctgactctttgcagcacaagtttgccaacccctggaccagactaataaaagttcttcagccccacctgccaagagctggaatgggcagccgcctgcacagtgttggtcaggatgggaaagtggtgaatttgctggtcacctttaggagaagtccactctgcatatgcaaaaaagggagctaccgtacacaaaaaccgttgctgctgacttccaagcacatgtgtttcaaactaatgatttaattacaataaatgcatgaaataaatgagaggggaaaactattgatcacagcagaaaacagaaagtaacttgaaagaacatgagtaagaaatggttggcacctgtgtaaaatgtaaagacttcccgtgagaaatgagaaaagtctggaacaaatgaaagatgccatagacgctgacatggggagtggagggcgaaatatcgtgaggccagctgttctttcaaaagttaatctttacatttagtaagatttgaatccagtttcccatgggttttcagaatttcacaagatgattttacgttttatcctagagtgtaattcagtctcgggcgtcaaagactttggaacggaagactcacccaggtgtcctcgtcctgctggtgtagacacgtgtgtgaacagcaggagaggagccgtctgggctctgggcagtgtgtgagcggctctgggctttggggcggcctgcctggcccaagcctgggccccaccactgtgacctgcctcaggagttaacacaaggaccatgtttggcaaagtcccagcacataagtaaatgctaaaatgttagctcttctgactgctgttttctgatccacagaagaggccaagtgaacagccccgtcctgaaatgaacccaggtgttcctgagaggtgatacggatgtcgtgagcatctcaaatcagtgaggatgggacagggtcaccagcagcaggtgctgggaaaatcagctttggatttggggaaaaacccaagttggactcttacctcacaccatgttcaaaactaaattcccctggtattgcagagtaaaggataaaggaaactctgagatgaccaggaggaagtggaggggaatattgatctgcatgtggcgtgaggaagaacgctgcgattgtaaactcaatcggagaaatccatgatgacagcaaacgcctgaccctgtgcacctaggcactcaggtagattaactcattcattccgacagctgcccatgggctgcagactgttctcatcccgttttacagatgaggaaacggaggcacggaggtgctaagtaacgtcctgaagaccacccacgagccacagagctgggatcctaccaaggagctgggagctggagcccctgatctcctctagccaccccgactgacctcagaacctcaaacgtaggacagtccagtcacatgcatgacgctaggagacagatcacagcgtggggagcaggaggtggatcacagctggccagcgtgtctcataaccttgtgatagacgcacagtccacaggaagatgggcaaagtccgcaaatagagaattcccaaaatacgaaatggaagcagccagaaaaaatgacagagacagtcactgtcaagaagggcgaccaaaacacccacacagaggccactcaggttcatttgttttctttttatctgatctccttttgagctgacttaaaggatgctaataggaatgaagatccgccagtctctctggaaagcagaaagcagttaggcactctgtggagagaatctgaaatttgtactcatgatgctttggaagacagtttggcagtggctgaaaatgatggagttaccaagggaggcagcaatcgccctcctagagtccacagagtccatcccccgaggaggaatgagaatcacactcctagagtccatcccccgcaggaggaatgagaatcacactcctagagtccagagtccatccccccaggaggaatgagaatcgcactcctagagtccatcccccgcaggaggaatgagaatcacactcctagagtccagagtccatccccccaggaggaatgagaatcgcactcctagagtccagagtccatccccccaggaggaatgagaatcgcactcctggagtccagagtccatccccccaggaggaatgagaatcgcactcctagggtccctccccccaggaggaatgagaatcgcactcctagagtccatccccccaggaggaatgagaatcgcactcctagagtccatccccccaggaggaatgagaatcgcactcctagagtccagagtccataccccccaggaggaatgagaatcacactcctggagtccagagtccatccccccaggaggaatgagaatcgcactcctagggtccctccccgcaggaggaatgagaatcgcactcctagagtccatccccccaggaggaatgagaatcgcactcctagagtccatccccccaggaggaatgagaatcgcactcctagagtccatccccccaggaggagtgagaatcgcactcctagagtccatccccccaggaggaatgagaatcgcactcctagggtccatccccccaggaggaatgagaaccgcactcctagggtccatccccccaggaggaatgagaacatgtccacacacaaacctgtacacgcctgttcttagcagcaccgttcccaacagccagaaagtggaaagagcccaagtgtccgtcagcggtcccacggaaaaacaaccttcatatacagccatgactggaatattattcagccttaaaaaggaatggcattctgatgaaccggcaacacggatgaacctcggaaacatgacgccgagtgaaggaagccagtcaccgaagtctgccctgttggagcccagtgatgtgaaacttccggaacaggcaaggtcacagaggccgaatgaaggcccgtggccgccagggtccaggacggagatggggagtggttgctgacgggtatggcgttgctttcgaggagatgaaggtgtcctaaagttggctgtggtgatggtcgcccaacctgggaattgatgctttaagtggcaaattttattgtatgtgaatcatatctcaataaaactgcagcacacaggtacttaggcatagcctggtatttgaggcagagaggccctgacccgtctctcccctggtccccaggggctctgctctgacagcacagcagctgcaggtgggggctgccctggcaagaccaccatgcccctctcctgacctctgttgatgtgaggactctgccccgtgtcgagctcagaggccagacacctggccacacagagaggcctgtcccaccccaaatggccatttgtcctgaacgtggacacaggacaaagaccatgagacagggaacctgagaacgtggctgggctttgaccttgagcttcagaagctacttggcccccacagctcgagggcagcgcctggccttagggaccccgagctgccctagtgggaggtgcttctgacgctgcctttgaggagcgcccctgagcctgccctgctgtccctggtcccctcaatgctgtccacccatgaactcgcaactgaatgaggctgtggagctgcagtcgccgagatgctgtggtcgcccctgatgccagccggggtcttctcctggggctgggagagggcaccgcacactgtgctgggtgagcctgggcacagggacagagcttcagagctgcaccatggcacagcacggaaggggaaggttggaagtggcagagccacgtccttcacacgcccttcgatgttgcccgagaggtgggcagttcccaaggccagtgcagcctcagggatggagatgccagccctgctccctagcgctggatgtgactgtggctccaggtgtgaacactggccccagggcctccgcagggcaaatgggcagccttgtggccagggagggcggcttccacctcccagggagctgcagcctctgaggtcagaggtggggttgagctggaccgagcgtgagatgctgagtgatgagtgagggccgcggtcactgtgcagccctgttgtgcctcctgcggttgcctgtgtgggggccttccctgggggatgctgttgggggggctctggcctcctttggaggacatgagggagatcctgggtcctctcatttagaattcagtgaggctgagtccaggaacccacctttggagtggacggaatgggtggcctgctgcagtgagcctggctgccggggccaagtgtgaaatttccttcttgagcagggcagtgcctgcagaactgggagccgagcacggggagcccagcatggggagggccttattgtcactggaggaaaggagggaagcccccggaatgtctatattgtttttaaaattgagatatagctctcagcagtgaaacacacacatcttaaaggtaccactgcgtggattgtgatgtcaccaaacccacatgggggcccccaggtcagacacagaatgtcccctgcagcccagcgggtgtcccagtcagcactcctcccgggcagccactcctgggcctctgggcgcacagcaagggaaggtcgaaggccacgcctgtgctcctgagtctcatctcgctgcctctggcctctcctgactccttgtacagagccccccagctcagtccctccaggaccctctactcaccccagtgaggagtgattgcaccacagcctcctcacctgagaccatctgcgccaataatcacattattaagtgagggaggccatgatgtgcacactcctaaacgggttattttaatttaagaggtataaaaagccaacattccccgggcagggtgtgttagtttccatgatgcataaccaggcagccgctgggtcagccctcaggagctccgtgttttttgccacttgtggctctgtcttcagtcctgagagttaatcggccgtcgcaggcagcccgacatggcaccttgaccttgctgctgctcagaattcagggccaagatgggacgctgccttcatggcccaaatgcattgtcaccggctcctcctttcaccactggattataaaccaagccacccctcgtatgagcatctcacctggatcctggtattcgtgattcaaaacaatgaaccttaatgctttgctcccttctccaaaaaggaaaaatcgtggtctatctgcaaaagcagcagctccatagaaatagcaaactgcagcccaccactaccccagcactgctgagaaccctcccccgcaccagggcccagtttctggaagcttctaggaacttctcaaagacccaaagatagctatgaggcaaagagaggaaatataccattggaaagacagaaatataattttcccatatttaaattaaatatttttttttcccagagaagtatgctagactatttaaccaaccaagaaatatgtgttcttacagcttagcaacttgcagaaaatgttgagactgcggtctggttctgtcaaagctaagcgaaagaatacacgccttcctttccagggccctggcactgcccattctgcttccttccccagctctccacctcatggcacagaagggctgcatagcgaatgcctgtgcacactaatcccagccttggttagggcggtctcctgccttcagcccgaggacacctgcatgcaggtgctgtgtcctctggggtgggtgagtggccggcactgtaattgctgacacaaggttagacatctgttgcagcccagatgtgtccagaggtgataactgatcttcgagctcgctgctcaggttaacaatgaccaataaaggatgaagtgttgagcagatctggggaggagcatgtgatggctccgcctgcctctctgtgtttgtcgtgggcttgctttcattgcttgtggactggttctcctggtgccatccttccctctcagagctgacagcgcctccccgtgcatttgccgtgcacagctccctttattccccggcgcgaggcacgattactccatggtctatggcagcaatctggccgtcaggacgttgagtcagcagaagctctgggggccctgcaccctcaactgtccaggactgcaggtcggctttctaagtgggagtctgatcggtgtccggatgtgctgattccttagaacccaccaagtgcccatcctcctggacactgctgcccatgcccatcccagctggcttgtccttaattagcacagggaggagctcacgctgcaggcccctctcctccaaccctggagagggtgaatggatgctcgaggcttttcctaacaggacccaacagtgactttgctaactaggagccccaaggagaagcctataccccaccctgctgggtgtggcctccctggctgggaggacggcagggcaggaggtggctgcaggagcgggggccctggggcagacgagctggtcgcagagccagcctccccgcattggctgcgtggctctgaggactcacagagcctccagactccggcccctccctgtgtgtttgcagataagacacagcaatagccttcactctctggttgcaaggaatagtaaccatttcccactgcttagtgagcaaaagtgggcttaccaggggggcagggatggagctgtgccccggcctcagttggcggatctgcctcgtactgtctccttcctaacgtggaagcacgtggcagcgtcgtggcttcagaaccgtctcagcgaaggtccagcaccgtcactggcccacactctcagccagggacagattccagagagagcagatgggctcagcatgtcacgtgtccacccctgatggagattcacacacgagagcccagccctggtgttgggggcagttcacagagatgtggtggctgcgatgtggcctcgcagggtctgcaggcaccgtgctgaggacatgcccccggcaggcctcacaattgccctgttctcaggggagctcagtgaccccccgccctcacccctgagaaccctgggactgtgccaggtaaacagccttagaaatggcagcagtgatgagaacatggccgcaggtcccatctgcctcctcgcagggccccgagtcagcgctcagggaggctgcgtcatccctgtaggaagtggagacccaacgtccccgaggatgtaggaagtggagacccagcgtccccgaggtgcgctcacagcgctgttgtgttggactctgggtgttcccaccaccctggctgtggtccttatccgcacagatggagaaaatgaggctctgggaagtgaggagtccgtgattccaccccagccccttggtgagctgcccagcccagatcctgccccccgttcccacactgcgaagccggagtcgtcctcaccgctgggtcccaccctgcgaaggtggagccgtcctcacccctgggtccctccctgcaaagctggaaccgtcctcaccgctgggtcccatctgggcaccttgggagtcacccggcatgttccccagcacctcctgcgtcgggcgtggaggggaaggtggcgggactctaggcattttctgcatgtgaacttcagagagagtcctcaagtccctgagtccacaggtcagcccctcagcagctcttttggactgaacggcatcccccaaatctatacatttaagcactgacccccagtctgaatgtatttggagatagggccttaaaggagagaagcttaagtgggatccttggggtccagggtcctgattcaagagaaccctgtctttctaagaagaggaggtgaggacacagacacacacagggctgagcctgtgcagactcagagatgccatctgcacgccgaggagaggggcctcagaagccagccttgccgcacctgtggatcccagacgtccagcctcctgggctgcagacagcgaatgtcctttgttcaagccatccagtctggggtacctggttacagcagctccagcaataacacggcagccttctggatgaacgcttgtagaagctgatgaggaaggtcgctgtggcttttcttctttattctgagttatactctgcaatagaaaaagtgccctgcattctctcttaggctgaactcttgaaattaaacagttttttgttaagaaccccatggttgggggtaaacactgttcctatcccgtgttacagacggggaaactggggctcccagaggctccagctgggaggctgtgggaggtcggggcacctgccaggctctggaggggtctggctgcaccggctcccctgcccaaccccacaggccccctcatccttcaccaggcacagccctgccccaccccacaggcccctcatccttcaccaggcacagccctgccccaccccacaggcccctcatccttcaccaggcacaggtgcacggggcccctgccaggttcgggaaaagaactgacccccacgaggatggtcctggtgttgagaaacctgcttcacagcggaggacacagacagcagagtcaagcacagttttagtcagagcccacattaacacagcaagagcccagccagagcaggtggggcaggagacgggtggagcgggtggtgctgtgtggcggagctggcggcgcagtggagcgggcgttgtggtggacccggtggcgtggcagaccaggcgacgtggtggacccggccgcatggtggaccaggcaacgtggtagactgggcagcgtgatggaccaggcgacatggtggaccgggccgcatggtggaccaggcaacgtggtagaccgggccgcatggtggaccaggcaacgtggtagaccgggcagtgtgatggaccaggcgacgtggtgggccgggtggtgtggtgaagccggcagcacagtggagcaggcattatggtggactgggcagcatggtgtattagaagaggagagatggcctggggtgctcagcggggctgagtccccagctgggagctcaggtgcgatgaagcccaagggactgacggtgtgaggagggccctctgctgcctccatgcagcccacacgcggggcccccacagtgcggacatgttggggcaatgctgcctggccccgccctcagcccagccctgggacgcaggctcagcagcccccggattccagtcaacatccccaggactcactcgggtcaggcacagtgtccaagctgtgtgagtctccgggagccgctggaacaaaatgccacacacccggtggcttcaaaccatgaaacccgttctcactgttctgggtccagacgtctgtggtcacagtgtctgctgggccgtgctcccgcaggaggcagcagcagagggtcctccctgcctcctcctgccattcttccggttcgggggtccagacgtctgtggtcacggtgtctgctgggccgtgctcccttgggaggctccagcagagggtcctccctgcctcttgcagccgctgtggctgcgtggctcccgcctctgtctctgtctgcatggggcctgctgctctgtgtgtttgccctgagtccagatttccttctccctgtaagggagtggtatccaccctaatctgatacgaccccattctaactcgatcacatctgctagaacctgctgccaagtaagaccccatgcacaggtatggggtcaggatcttcatgtctgttactgtagaacacagttcagcctcaacagaggactaagtctagtacagcacagtcttcattcctgagctcatggaggagggggagggctgccaggtgcgtcctcattccggcgtaccacggccaggagcggactgtgggggagctgggccccgccgtgggcagccgaggcgctgacgtctctgatgtccaatctgccagcccagctgtgttgggggagctcctctaccctgagggaaagaaccctgcctgcattcgtctttgccgccctcctgagtcaggtgccttgtttatggcagatggataaatgtttgacagataaacagatgatccgtccgcacattcctcagccgatgcccccacctgccctacagcagccgagtgttgcttggtggcctggggcactgtgtctggcttcagtgatcacaccagtcgtgatgagtttgggggattttacttgttaatttttctgcgtagtttcagtcctagggctgggtttgccgtcggggaagctccgagttgcgcctgccaaggctgttctgtcgagatggagtcatccctgaaccctgcacttgtgcagccccacggcacgggggtggcctcgttcccagaatgtgtgtcttcggccgtgaggaaggggctggccctaaggacgatgctggctccatgatggcccttagtccctgacatttcttggtgggatcaaggagaccgaggggagctctgggccctgtgcgttgagcatcgctctgtagagggtggctgactcaggctccaaggtgggggccacagactgtggttctctggtgaccccagatgagggccacccttgggcagcttcacctcctgaaaaggagatgtttttggagtctcgtgagatgaaggctggagcggtgtggcgagcagggaaggcctggaggcatcgatacctggtggccctccccaggccatgacccgtgtggttcgtgggattggagccgggtcccagtcaagttgtagagcccccactgattccctcagccctgcagccttggggaaatgggctttgcagggcactcggcaaagtcgctctgcagacacagcctcctcgttagagagcggtgctaaacctgtgtgctcttccggcgacacggtcctaacttgggtggtttcttacatttccagagcacctttacgaacatctttttctctgtgcttccgcagccctgggaggcagggggcgggttcctttttttcttttctttattttttttgagacagagttttcactcttgttgcccaggctggagtgcagtggcacgatctcggctcactgcaacctctgcctaccaggttcaagcgattctcctgcctcagcctcccgagtagctgagattacagacatgcaccaccatggcctgcttttgtacttttagtagagacggggtttcaccgtgttagtcaggatggtctcgaactcctgacctcaggtgatccacctgccttggcctcccaaagtgctgggattacgggcgtgagccactgcgcccggcaggagtgggttctgtctcatccctgggaccattagcctgtgagggtgtctcagcagccctgagccctgaacccgagtctgctacccagtcctggctctttggtggagcaggctcattgcacagggcacagctttgtcatcggcagctggcctgtccagggttcaccctgagcattggcacacacggctttgtcggcggcggctggcctgtccggggttcaccctgagcattggcacacaacagctttgtcgtcggcggctggcctgtccagggttcaccctgagcatgggcacacaacggctttgtcgtcggcggctggcctgcccggggttcaccctgagcatgggcacacacggctttgtcgtcggcggctggcctgcccggggttcaccctgagcatgggcacacacggctttgtcgttggcggctggcctgtccggggttcaccctgagcatgggcacacacggctttgtcgtcggcagctggcctgtccggggttcaccctgagcacacacatgacatagtgttcaatggctcagccctgtattttggcgttacaggagttacctgaggtcctagaattcactccgtcttcagtctcagctgatgactgttcatctggggcagcagcggtgcctcctgtcagatgcctcttctgtccactgtggtccacgtgggtacttggagggggcccgggaggtgtcagcaccggcccaaagatttcatataaaccgtggctcttctgcccctggtcccacaggctggagcttggtgtcaggcacctctcctggcagcaccacgggaaggaaggtcctgagaggcctcgcttcaccacacacgcgtcagaggagggcgggccggtgagctgagctcctgcgtgagagcgggagctgccacctgtgagacccgcaggggcacactgtcccggggagagaggtgtgtgagctgcacacacaggatgcagcctccaggagacagcgatgggctggggtccttgtgtccctcactggggcacattcagcgtccattcaaggaaagggcgtgtgtccccaggatccgcctgggctgagtagcttggtcgcctccggcccctgtccttgtggtttctggctggcactgggcctggcccttctcggtgttgtctttctgctctcagtgaagtcgtccagggcattctgggctttcaggctggcctccaccccgtgccgttcaggaagcaccccactcgtcaggcaggcagacaccccagtcacccgtcactctcattttcaacataagagacattgacatcagctggacatggtggcacgtgcctgtggtcccagttgctcaggaggctgaggtgggaggatggcttgagcccaggagttcaaggctgcagtgagctgcaatcgcaccactgcactccagcctgggtgacaaggccagaccccgtcttgttaaagaaaaaaaagagagatgctcacgtggtgctggctctattagatctcttcaagccatagcactaactcaggaagtgggtgtgtgtttacacatggagaaactgaggcacagggggacgctcagagagtaagtggatgttcagatagtaattgctgctgcagcattcggacccgggaggtgtgccccgccctgggaagaggggttctagcttggcctcctaccaggtggcagcctagtccagccttgttacaggacagaagccggaggggcctcgtcacctgtcatcagggtggattgggatggcagcctgcttcctcagcagagggtcagcctgctccgcacccctggggcctggtgcctgctgagctccccgtcccaccccggcagccatcctcaggcagctcaccagcctgatgggtaccggacccccatgtcctcaggaggctggtggccagcacctcccttccagtaggaccctcgcccataccctacagagtgggctcaacgccctggagcccaggaaggagtggttcacaggctaggagggcggagggcaggggagtggacaccatgagccaacaggactggaggccaccatggtgtcaccattcccgcccggccctgccctgccctaatgcactttgctgctcagcctaagaactaaggggccctgggactggagaaggttccctgtgaagatgacctgctgcagctcaggacgcctgctgggattgctagaatgaatgccctgtagcctgagtccctgatgttctgcatggtgatttgaacagcagcaaccaaccacagccgctccagcccttctcgtggacctggccttggggtgcaggaagcgttggggccttggttgtgacctggctctgcaccttcagggagcagccccaggaaagaagccaaaggcttcctgaacatggctgggattcggtatgtatttccagagtggcctccctgattccacttgggtttttcccaagatacagtgtccctcgtcccaggggtccgtggaggtggcaccatggtcttcacgctgtcttgctgctttcttcttactgtttactggaacctttagtatgggctccattcaggacagcgtgttctggccaggcacagtggctcatgcctgtaatcccagcactttgagaggccaaggtgagcggatcacctgaggtcaggagtttgagaccagcccagccaacatggtgaaagtccatctctactaaaaatataaaaattagcccggcatggaggcgcatgcctgtagtcccagcttctcaggaggctgaggcaggaggatcacttgaacgggggaggcagaggttgcggtgagccgagatcgcaccactgtacttcagcctgggtagcagagcaagactctgtctaaaaaaaaaaaaaaaaaaaaagaatagcgtgttccttcatacagcaggctcctcctgaccttaacgtcagatggaaacttctagtgaggaagagaaagtatcatttacctggatgaatggagctgggaggtttggttctgttgtttgtgtctgagcacagggtaaacctcttatgtaagctgaacacgcgctccacaggctcaggaccacgccctccggtcactcctgatggaaaggcttgtgtgggccaagcatcaggtgcccgcaggtgaagcaggcagctagggaccacaccgttcatgccagcttgttgggcatccacagcccggtgtgatggcaagctcactctggggccaattctgagccctctggggactgggttctggaacaacggctgcagactgcaggacacaggccttggccttggactgtggatgaccgagcgcccgtggacccagcagaggggagctcagagccagcttcctttccaggccccaggggtgcagtgaggagacacaccagctgtgacccaggccacaagtgtccacaggcagagagggctggctgggccacaggcagaacggccgtggtggcagctccaggaagccaggttgggaaggcgtctgaggctccctgtctcaaaggtgtgccatggggctgttctgtccccggggcaggtcccctcacccctgagcctcaggtcctgttgagtgtgggttctaatcccacagccccgttgggtagacgaggctatgacaaggtgacggcaaggtcgttcccagagcagtgactggcgcccaggagctcaggaaccgcagctggccagggtgctggagatgacccctggccctgacggaacctgggatttggggaggccctgcagttgcgagaccctcatcatcaccgcccctggctgagtaaggaatttaacacaaggcagatgaggcctaacccaggtgggcaggtgcctggaggtgcccgcccaggagacagcatcagggtgggctcagaactttcagcagggccagggtcccatgatgagtttcctggccaaggtcggttcaagggcagattctcagggctgcctggggcccagggaaagggtgagtgtcagggggaagctgagccccagggcctctgcctcctgttgaagagaatactcccggggccagatgggacagggtctgtgtcgacatggggaccgtgtgaggatggaggcagagatcaggacgatgcgtctcccgggcaaggagcactgaggattgcttggagcaccagaaacccctagggggcctggagtggaccctccctcagatcctccagcaggaacaggccctgtccacaccttgagtctgggcaagaagaactaactgctctttcagatccccatcccccagtatgtggtcatttgattgggcagccacgggaatggcacacagacctgtagaggcccggcgtggatggccaggggagggtggctccgtggtgggggtgcggccaggtcccccagcctgcagcgaccattctgggtgagctctgcagtctgtggcctcagaggcccaggaagctgggaggggtttgaattggatacagggaatagggagccacagatggttcttgagctgtggagtggcaaagtgatatggctgcatagaggaaggaagccggcaagtggggtgggaaggcctctggccgaggctgacagcccctccaggtcgtgcacagagggcgccccactctcccgagacacaaggaagggtggggatttgggggcactgtctggtggcctggatgtccctcacagcactgaggatgagctcttcgtttcaggccctccaggaggccggctggcaggagccggggagggaagaggagcctgtgttccctgtggccctgggcagcgtctgcaggaggctcaccctctctctctctttgctcctcaggtctcctgacaaacacagcccctgaggggccccgggagtggccttggctccctggagagcccacgtctcagccacagttctccactcgcctcggacttcacccgttctctgccgcccgcccactccgtttccctgtggtccgtgaaggacggcctcaggccttggcatcctgagcttcggtctgtccagccgacccgaggaggccggactcagacacataggcggggggcggcacctggcatcagcaatacgcagtctgtgggagcccggccgcgcccagcccccgccgaccgtggcgttggccctgctgtcctcagaggaggaggaggaggaggcagctccggcagccacagaaggctgcagcccagcccgcctgagacacgacgcctgccccaggggactgtcaggcacagaagcggcctcctcccgtgccccagactgtccgaattgcttttattttcttatactttcagtatactccatagaccaaagagcaaaatctatctgaacctggacgcaccctcactgtcagggtccctggggtcgcttgtgcgggcgggagggcaatggtggcagagacatgctggtggccccggcggagcggagagggcggccgtggtggaggcctccaccccaggagcaccccgcgcaccctcggaggacgggcttcggctgcgcggaggccgtggcacacctgcgggaggcagcgacggcccccacgcagacgccgggaacgcaggccgctttattcctctgtacttagatcaacttgaccgtactaaaatccctttctgttttaaccagttaaacatgcctcttctacagctccatttttgatagttggataatccagtatctgccaagagcatgttgggtctcccgtgactgctgcctcatcgataccccatttagctccagaaagcaaagaaaactcgagtaacacttgtttgaaagagatcattaaatgtattttgcaaagcctaaagttatatatttaacagtttttatatgttgtatatttgtagaaaatcctatttaacaattaacgtggcagtcccggccgtcctgagagtcgggccgagccccgtgtgtttctgaagactctgggggtgggacacggcggggaggtggtgccccgcggaccccggggtgccaggcacggaaggcgggactctgggagaagcgtgcggaggaccgtggcgtcggcgtcccggatgtgtcggtcgtgcccggggaggccgggttcccctcgctgcgggccaggcttggctcctgattccctctctggtccctgtattggtcaacacttgagcgtacaatatcttgaacatgcttcttccaatgggttttgtttcccatttcctgcccctttcgccactcacggaccttgaggccagttgacggcccttctccccacgcctgtgtccccgcgttctgagaagtcctctgtcttcgtgtcactaggtccagaaagtcgcgccgggcagaggcgcaggcggggccggcagggccgaggaataagcgacaattctggtttttctcccctggccgtcgttcgccagcctccttcattttcctgagttcccgctgaagtatatactacctatgagtccaattaacatgagtattatgctagttctatcctactaaaaaaaacgtaaaaaaataactatatagaagctgttccagcaaccatagactgaagatacgaaagaaaatccatttatttaagacctgttccggtatccatgaggacataatttacctttcagtcaccacaaatttataggcatttgtatcctggactaaaagaaggggctgaggttgggtttgtcatcacagagggggtgggcctggaaagggtccttcccaagctgccccggctccggcggcccgggccggcagcctctgccagccagcgtcctcacggcctccccctcgcctgtttcttttgaaagcaagtgtagacaccttcgagggcagagatcgggagatttaagatgttacagcatatttttttttcttgttttacagtattcaattttgtgttgattcagctaaattatgaaaaataaagaaaaactcctttgataagcatggcttttgttccctgggcgtggtgtcctgggagaggggctgtggctggtgaggctggtggggatgacaggttggggccagcacagggacccccagggtcagagcagacagtgcctgcagccctcacggcatagccggtgccgcctgtgagcccctgggttcttctgcacccacaaggatggcctctgaagcccagccccagacgagtgggcagtgcctggctgcagccctctggggggctgtcatccctgcctgaatatcgctgccccacacagacactgcgccctgagtccctccacggatctgacgtgcggccgcctgagtgtggcaggcatcggctctccttcattcctcccctggccggtggggaagcccaggctgtcagtagggaggctggccccaggttctcgtgagctggccccacacaggtgccatacacagagctccccaaggaggcccaggtctgaagcaccccctttgcagagacatccacttagagcaggttggagcccagagcctccttgctgcccacacctgaggccacctgggtgggaccaccaggtaccccccagctgctcttccatagggcatctcggactgggcagctgggctggggggctgcgccacgggctgcctggccgtctgtgcttccttccaaggagacgtcactggtctttggagccatcaaggtggacagacaaggcctcagcttttcccataaggggctgggtttctcctgggagggagggcaggaggcggagctacagtggctgcaggagcacctgggctggcctcttccccatcgggtgccctggtgcctgggctggagggtcctccgttccctcccacagaggagaggcacggcatgaagtatgtattctgtgg

SEQ ID NO: 95 - DNA, 378 bp, Homo sapiens
  CDS (1)..(378)
atgcagctcctgaaggcgctctgggcactggcaggggccgcgctctgctgcttcctcgtcctagtgatccacgcgcagttcctcaaagaaggtcagctggccgccggcacctgtgagattgtgaccttggaccgggacagcagccagcctcggaggacgatcgcccggcagaccgcccgctgtgcgtgtagaaaggggcagatcgccggcaccacgagagcccggcccgcctgtgtggacgcaagaatcatcaagaccaagcagtggtgtgacatgcttccgtgtctggagggggaaggctgcgacttgttaatcaaccggtcaggctggacgtgcacgcagcccggcgggaggataaagaccaccacggtctcctga

SEQ ID NO: 96 - protein, 125 aa, Homo sapiens
MQLLKALWALAGAALCCFLVLVIHAQFLKEGQLAAGTCEIVTLDRDSSQPRRTIARQTARCACRKGQIAGTTRARPACVDARIIKTKQWCDMLPCLEGEGCDLLINRSGWTCTQPGGRIKTTTVS

SEQ ID NO: 97 - DNA, 20 bp, Sus scrofa
gggccaagtgcagcggctac

SEQ ID NO: 98 - DNA, 21 bp, Sus scrofa
ctccatcatcttcagcttgtc

SEQ ID NO: 99 - DNA, 36 bp, Sus scrofa
ggggaattcgccaccatggtgaaggtcggagtgaac

SEQ ID NO: 100 - DNA, 30 bp, Sus scrofa
ggggaattcgatgacaagcttcccattctc
